(19) United States
(12) Patent Application Publication
(10) Pub. No.: US 2023/0340469 A1
(43) Pub. Date: Oct. 26, 2023

(54) TRANS-SPLICING SYSTEM FOR TISSUE-SPECIFIC REPLACEMENT OF RNA SEQUENCES

(71) Applicant: Tacit Therapeutics, Inc., South San Francisco, CA (US)

(72) Inventor: David A. Nelles, San Francisco, CA (US)

(21) Appl. No.: 18/189,896

(22) Filed: Mar. 24, 2023

Related U.S. Application Data
(63) Continuation of application No. PCT/US2021/052315, filed on Sep. 28, 2021.
(60) Provisional application No. 63/084,027, filed on Sep. 28, 2020.

(51) Int. Cl. C12N 15/11; C12N 15/86

(52) U.S. Cl. CPC C12N 15/111; C12N 15/86; C12N 2750/14143; C12N 2310/124; C12N 2320/33

(57) ABSTRACT

Disclosed are compositions comprising: a trans-splicing nucleic acid comprising (a) one or more replacement domains that encode a therapeutic sequence; and (b) one or more intronic domains that promote RNA splicing of the replacement domain primarily in a specific tissue or cell type; and (c) one or more antisense domains that promote binding to a target RNA molecule, wherein an RNA trans-splicing reaction promotes insertion of the replacement domain into a target RNA. Methods of making and methods of using compositions of the disclosure are also provided, including but not limited to compositions of the disclosure that may be used in the treatment of a disease or disorder in a patient or subject. Example disease or disorders of the disclosure include genetic and epigenetic diseases or disorders.

### CROSS-REFERENCE

[0001] This application is a continuation of International Application No. PCT/US2021/052315, filed on Sep. 28, 2021, which claims priority to U.S. provisional application No. 63/084,027, filed on Sep. 28, 2020, the entirety of which are hereby incorporated by reference herein.

### SEQUENCE LISTING

[0002] The instant application contains a Sequence Listing which has been submitted electronically in XML format is hereby incorporated by reference in its entirety. Said XML copy, created on Jul. 18, 2023, is named 63827_702_301_SL.xml and is 1,655,569 bytes in size.

### FIELD OF THE DISCLOSURE

[0003] The is a disclosure directed to gene therapy, molecular biology, and compositions and methods for altering the sequence composition of RNA molecules.

### BACKGROUND

[0004] There is a long-felt but unmet need in the art for, 1) controlling the location and timing of gene therapy activity in patients, and 2) replacing disease-causing RNA sequences. The disclosure provides compositions and methods for restricting the activity of an RNA trans-splicing system to specific and chosen tissues. Specifically, the disclosures provides compositions and methods for insertion of chosen RNA sequences into target RNAs using trans-splicing mediated by introns that induce cell type-specific RNA splicing patterns.

[0005] Current approaches to achieve tissue- or cell type-specific activity of gene therapies rely on the use of tissue-restricted promoters. But an ideal therapeutic would involve the high expression levels associated with non-specific promoters while maintaining tissue specificity and extend the range of tissue-restricted systems beyond those available using tissue-restricted promoters. Alternative exon choice during RNA splicing follows highly tissue-restricted patterns.

### SUMMARY

[0006] This disclosure provides a composition comprising a nucleic acid sequence encoding a trans-splicing RNA molecule comprising (a) at least one domain that promotes trans-splicing in a tissue-restricted manner (“Intronic Domain”), (b) at least one binding domain (“Antisense Domain”) that consists of a sequence complementary to a pre-mRNA present in a human cells (“Target RNA”), and (c) one coding domain that is inserted into the Target RNA via trans-splicing (“Replacement Domain”).

[0007] In some embodiments, the Antisense Domain is complementary to a gene (corresponding disease) that can cause disease in the brain and is selected from the group consisting of: SOD1, TARDBP, FUS, MATR3, SOD1, C9ORF72 (Amyotrophic lateral sclerosis); MAPT, PGRN (Frontotemporal dementia with parkinsonism); CDH23, MYO7A, USH2A (Usher's syndrome); GALC (Krabbe disease); SMPD1, NPC1, NPC2 (Niemann Pick disease); PRNP (prion disease); SCN1A (Dravet syndrome); PINK1, ATPGAP2 (early-onset Parkinson's disease); ATXN1, ATXN2, ATXN3, PLEKHG4, SPTBN2, CACNA1A, ATXN7, TTBK2, PPP2R2B, KCNC3, PRKCG, ITRP1, TBP, KCND1, FGF14 (spinocerebellar ataxics); SCN1A, SCN2A, CACNA1A, GRIN2B, GRIN2A, MECP2, FOXG1, SLC6A1, PRRT2, PTEN, KCNQ2, KCNQ3, STARD7, CLRN1 (genetic epilepsy disorders); ATM (Ataxia-telangiectasia); GLB1 (GM1 gangliosidosis); GBA (Gaucher disease); GM2A (GM2 gangliosidosis); UBE3A (Angelman syndrome); SLC2A1 (glucose transporter deficiency type 1); GLA (Fabry disease); MYOC, OPTN, TBK1, WDR36, CYPIB1 (Open Angle Glaucoma); IDUA (Hurler syndrome or Mucopolysaccharidosis 1); IDS (Hunter syndrome or Mucopolysaccharidosis 2); and CLN3 (Batten disease).

[0008] In some embodiments, the Intronic Domains promote trans-splicing primarily in brain tissue and are derived or isolated from a gene selected from the group consisting of: UBB, GFAP, STMN1, RPL13A, UCHL1, TUBB2B, ALDOA, LRRC75A-AS1, DYNLRB1, TPI1, PKM, NDRG2, MT3, RTN3, SKP1, RTN1, NRGN, DBNDD2, BSCL2, ALDOC, S100B, GNG3, FXYD6, PRDX1, HSP90AA1, SRP14, ATF4, NDUFB8, CAPZB, ATF5, ADD1, ERGIC3, GUK1, DCTN1, GSN, MORF4L1, GNAI2, SPP1, CRIP2, RNASE1, EIF4G2, PAQR6, DCTN3, CALB2, COMMD6, MEST, STXBP1, CLDND1, SH3GLB2, NREP, ABCA2, SUN2, UBXN6, DBI, CDK2AP1, NFIX, SF1, HNRNPF, GPM6B, SQSTM1, MOBP, ANAPC11, POLD2, SAMD4B, IST1, TPD52, SHD, STK25, ABR, PQBP1, PHB, SEPT9, S100A13, APBB1, RANBP1, ARHGEF2, DLGAP4, GNAO1, SEZ6L2, FDFT1, CBX1, EIF4G1, FAM213A, MAPK8IP1, PSME1, CCAR2, TKT, SYN1, OGDH, OCIAD1, SLC3A2, SLC1A5, PTTG1, DNM1, MAP6, KDM1A, PTN, FN1, CSNK1E, TMEM9, MATR3, AHCYL1, ATP6V0A1, CDIP1, CYFIP2, SLIRP, SCG5, TPX2, DMTN, SSBP1, PFKL, KIAA0930, CAMTA1, PRC1, CHTF8, TMPRSS3, BIN1, CCT8, AMZ2, TM7SF2, SEC11A, CLPTM1, AMPD2, DHX9, GAB2, CLTC, PSME3, RPP21, DYNC1I2, CDC20, NOSIP, ATP13A2, AIF1L, SURF4, PTPRN2, STK24, SDR39U1, HMOX2, UBAP2L, NRCAM, CCDC3, GPT2, TNPO2, NRXN2, PPP1R7, CAMK2A, UBE2L6, DBNL, ADAR, RNF220, MCM2, DTNA, PDIA6, PSMG2, URM1, SNX17, SV2A, SPG21, REEP2, HSD17B4, GSTO1, TRAPPC3, ZNF385A, SHISA5, FAM107B, MID1IP1, SERPINE2, CDK5RAP3, COMMD4, ANAPC15, CABP1, PTPRA, NPTN, RERE, VPS29, SPTBN2, MT1G, DTX3, GOLGA7, TPD52L2, EPB41L3, SPIN1, FARP1, NUP62, CNOT1, TMEM108, DUT, MAPRE2, PSD, NEBL, UBE2L3, KIF5C, TCF19, WDR54, CPSF7, GIT1, L1CAM, ITPR3, RHPN2, HMGA1, KCNAB2, HID1, SHF, CD99L2, C19ORF25, PAF1, B4GALT2, PTGES2, CAPG, SEMA4D, TTYH2, EXOC7, CNDP1, TACC2, BACE1, GABBR1, LMNB1, SLAIN1, GLG1, APBA2, CADM3, PC, PHLDB1, HHATL, SOGA1, CNTNAP2, RFC2, MAPK8IP3, CD200, REC8, TACC3, SYT13, SRP68, KLC4, CORO1C, ATPAF1, NARF, AP3B2, NUP93, FAM102A, SCN1B, NDUFS2, CBFA2T2, PSMA5, EPB41, and BCAR1.

[0009] In some embodiments, the Antisense Domain is complementary to a gene that can cause disease in the liver (corresponding disease) and is selected from the group consisting of: GLB1 (GM1 gangliosidosis); GBA (Gaucher disease); GM2A (GM2 gangliosidosis); PCSK9, LDLR, APOB, APOE (Familial hypercholesterolemia); GAA (Pompe disease); MYOC, OPTN, TBK1, WDR36, CYPIB1 (Open Angle Glaucoma); IDS (Hunter syndrome or Mucopolysaccharidosis 2); IDUA (Hurler syndrome or Mucopolysaccharidosis 1); CLN3 (Batten disease); F9 (Hemophilia B); and F8 (Hemophilia A).

[0010] In some embodiments, the Intronic Domains promote trans-splicing primarily in liver tissue and are derived or isolated from a gene selected from the group consisting of: ORM1, ORM2, PLG, ALDOB, CYP2C8, CPS1, ADH4, PON1, CFHR3, C6, DBI, ITIH3, ITIH4, C4BPB, PTGR1, C5, LBP, PRDX1, HPD, UBB, HPR, ADH6, RPL15, CXCL2, DPYS, HAL, SLC39A14, AQP9, SERPINA10, ADH1A, HABP2, SERPINF2, ECI2, APOM, KLKB1, ACSM5, SLCO1B3, ASGR2, IL1RAP, PSMA1, GRB14, LRRC75A-AS1, BCHE, EPHX1, DMGDH, MST1, ACSM3, SEPT2, TFR2, NDUFC1, NR1H4, AFMID, HNMT, TTC39C, RDH16, GPAM, SLC13A5, SERF2, PICALM, PCSK6, TOM1L1, ANPEP, EBNA1BP2, RCL1, DEPDC7, BTG1, KRT8, ABCA6, GJB1, KMO, HSD17B13, LEAP2, PECR, LEPR, CTNND1, ENSA, MASP2, KYNU, ABCB4, DNASE1L3, ACSL5, UBE2V1, SPTBN1, RBPMS, RAB13, IL1R1, SERPINA5, FGGY, TMEM220, ACSS2, VNN1, CTAGE5, MS4A6A, MFSD2A, SKAP1, VDAC2, SLC22A7, PPP2R5C, SORBS2, CDV3, CSAD, TRPM8, TOMM5, SLCO2B1, MICU1, NCOR1, GSAP, CBWD5, ENPP1, SPATS2L, FKBP5, NR3C1, IGF2, IGF1, PLSCR4, MYLK, SLC27A5, ALDH5A1, TXLNGY, PSMB5, MOCOS, PET100, SGK1, AZ12, TJP2, FMO4, STEAP1, DMD, RNF14, RBM34, PABPC1L, ZCCHC9, ANO6, AGMAT, MASP1, IL17RB, MRPS27, MLIP, MON2, ETF1, SULT1B1, GBP7, PRKACA, PI4K2B, SP100, TMED6, NFU1, RMDN2, IP6K2, CCNB1IP1, PCBP1-AS1, SLC39A1, and PHF11

[0011] In some embodiments, the Antisense Domain is complementary to a gene that can cause disease in the heart (corresponding disease) and is selected from the group consisting of: LAMP2 (Danon disease); GLA (Fabry disease); SLC2A1 (glucose transporter deficiency type 1); UBE3A (Angelman syndrome); MYOC, OPTN, TBK1, WDR36, CYPIB1 (Open Angle Glaucoma); IDUA (Hurler syndrome or Mucopolysaccharidosis 1); IDS (Hunter syndrome or Mucopolysaccharidosis 2); CLN3 (Batten disease); LMNA (Limb-girdle muscular dystrophy type 1B); DMD (Duchenne muscular dystrophy); DYSF (Limb-girdle muscular dystrophy type 2B); SGCB (Limb-girdle muscular dystrophy type 2E); SGCG (Limb-girdle muscular dystrophy type 2C); SGCA (Limb-girdle muscular dystrophy type 2D); SGCD (Limb-girdle muscular dystrophy type 2F); DUX4, D4Z4 (Facioscapulohumeral muscular dystrophy); F9 (Hemophilia B); F8 (Hemophilia A).

[0012] In some embodiments, the Intronic Domains promote trans-splicing primarily in heart tissue and are derived or isolated from a gene selected from the group consisting of: TNNI3, TNNT2, MB, FHL2, CSRP3, FHL1, UBB, MYOM2, CD36, GSN, PDHA1, CRIP2, POPDC2, SORBS2, CPT1B, RYR2, ANXA11, ITGA7, SORBS1, NDUFC1, NEXN, MYH7B, ABLIM1, NEBL, CAST, NME2, CYB5R3, TRDN, TACC2, NDUFA5, MYL12B, FHOD3, CALCOCO2, NCAM1, GPD1L, SGCA, AQP1, AKAP1, ARL6IP4, LRRC39, TTN, TSC22D1, PPP1R12B, OBSL1, MYO15B, PKIG, HMOX2, CDK18, BTNL9, ITGB1BP2, SEPT2, CAV2, DTNA, C15orf41, ATP1A1, BCO2, MYL4, ADCY5, CLIC5, SLC8A1, RRAD, AKAP13, AK3, MYO1C, FGF12, LAMA5, ADAM15, WNK2, SUN1, KLHL7, RNF207, HIF3A, HSPG2, LPCAT4, ADH1B, ENY2, RGS3, FRMD3, CCNB1IP1, PHC2, STAB1, HAND2-AS1, PTPN3, PARVB, PKD1, SPEG, SYNE2, ZNF638, SEPT4, DAG1, SLC12A7, FBXO18, FAM107A, RBM17, MYPN, GRIP2, SCN5A, WFS1, RABGAP1L, SYNE1, HLA-DRB5, SNRPN, MEG3, RAPGEF3, SEC13, C1QTNF1, UCKL1, FRY, IP6K2, CUX1, ANK3, MYH14, ADCY4, C3orf18, MYLK3, PXN, TSPAN18, PDE1C, C6orf48, BCS1L, ATG4D, HRAS, TENM2, PLXNB1, N4BP2L2, TNXB, LTBP1, MAPK8IP3, COL1A1, GOAT, ACOT11, MTUS2, VPS45, and KCNIP2.

[0013] In some embodiments, the Antisense Domain is complementary to a gene that can cause disease in the retina (corresponding disease) and is selected from the group consisting of: USHA2A, RPGR, RP2, RHO, PRPF31, USH1F, PRPF3, PRPF6 (Retinitis pigmentosa)

[0014] In some embodiments, the Intronic Domains promote trans-splicing primarily in retinal tissue and are derived or isolated from a gene selected from the group consisting of: ADGRV1, AMPH, ATP1B2, BSG, CASK, CC2D2A, CEP290, CLTC, DMD, DOC2B, EFR3A, ERP44, FARP2, FN3KRP, GRAMD1B, GSS, HCN1, IFT140, IMPDH1, INTS13, KCTD5, KIF1B, KIF1B, KMT2D, MADD, MAN2A2, MARCH1, MSI2, NAP1L4, PPP3CC, PROM1, PTPRF, PTPRF, RIMS2, SLC17A7, SLC4A7, STXBP5, TTC8, UNC13B, UNC13B, WDR47, and YKT6.

[0015] In some embodiments, the Antisense Domain is complementary to a gene that can cause disease in muscle (corresponding disease) and is selected from the group consisting of: LAMP2 (Danon disease); GLA (Fabry disease); SLC2A1 (glucose transporter deficiency type 1); UBE3A (Angelman syndrome); MYOC, OPTN, TBK1, WDR36, CYPIB1 (Open Angle Glaucoma); IDUA (Hurler syndrome or Mucopolysaccharidosis 1); IDS (Hunter syndrome or Mucopolysaccharidosis 2); CLN3 (Batten disease); LMNA (Limb-girdle muscular dystrophy type 1B); DMD (Duchenne muscular dystrophy); DYSF (Limb-girdle muscular dystrophy type 2B); SGCB (Limb-girdle muscular dystrophy type 2E); SGCG (Limb-girdle muscular dystrophy type 2C); SGCA (Limb-girdle muscular dystrophy type 2D); SGCD (Limb-girdle muscular dystrophy type 2F); DUX4, D4Z4 (Facioscapulohumeral muscular dystrophy); F9 (Hemophilia B); and F8 (Hemophilia A)

[0016] In some embodiments, the Intronic Domains promote trans-splicing primarily in muscle tissue and are derived or isolated from a gene selected from the group consisting of: ALDOA, TNNT3, MYBPC1, ATP2A1, NEB, STAC3, CMYA5, MYH7, TNNI1, CA3, ASB5, PLIN2, TRDN, OBSCN, RYR1, RAP1A, SPARCL1, CSNK1A1, NPEPPS, AKR1C3, IDI2, MBNL1, FNDC5, TMOD4, ATP6V1F, DAP3, KPNB1, NOMO2, BEST3, HP1BP3, SEPT2, TIMM23, MYPN, DHRS7C, PALLD, POLR2J3, KANSL3, THOC7, MEF2C, NOMO1, YWHAZ, ZBTB16, SPAG9, CCZ1, MYLK2, ASAH1, GTF2I, CCPG1, SURF4, SMARCA2, CLTCL1, SLC6A6, CHRNB1, MAFG, COMMD6, SLC7A8, CDK11B, and DNASE1L1.

[0017] In some embodiments, the Antisense Domain is complementary to a gene (corresponding accession numbers in brackets, corresponding disease in parentheses) that encodes a Target RNA that sometimes carry disease-causing mutations and is selected from the group consisting of: TNFRSF13B [ENSG00000240505] (common variable immune deficiency); ADA, CECR1 [ENSG00000196839, ENSG00000093072] (Adenosine deaminase deficiency); IL2RG [ENSG00000147168] (X-linked severe combined immunodeficiency); HBB [ENSG00000244734] (Beta-thassalemia); HBA1, HBA2 [ENSG00000206172, ENSG00000188536] (alpha-thassalemia); U2AF1 [ENSG00000160201] (myelodysplastic syndrome); SOD1, TARDBP, FUS, MATR3, SOD1, C9ORF72 [ENSG00000142168, ENSG00000120948, ENSG00000089280, ENSG00000015479, ENSG00000142168, ENSG00000147894] (Amyotrophic lateral sclerosis); MAPT, PGRN [ENSG00000186868, ENSG00000030582] (Frontotemporal dementia with parkinsonism); CDH23, MYO7A, USH2A [ENSG00000107736, ENSG00000137474, ENSG00000042781] (Usher's syndrome); GALC [ENSG00000054983] (Krabbe disease); SMPD1, NPC1, NPC2 [ENSG00000166311, ENSG00000141458, ENSG00000119655] (Niemann Pick disease); PRNP [ENSG00000171867] (prion disease); SCN1A [ENSG00000144285] (Dravet syndrome); PINK1, ATPGAP2 [ENSG00000158828] (early-onset Parkinson's disease); ATXN1, ATXN2, ATXN3, PLEKHG4, SPTBN2, CACNA1A, ATXN7, TTBK2, PPP2R2B, KCNC3, PRKCG, ITPR1, TBP, KCND1, FGF14 [ENSG00000124788, ENSG00000204842, ENSG00000066427, ENSG00000196155, ENSG00000173898, ENSG00000141837, ENSG00000163635, ENSG00000128881, ENSG00000156475, ENSG00000131398, ENSG00000126583, ENSG00000150995, ENSG00000112592, ENSG00000102057, ENSG00000102466] (spinocerebellar ataxias); SCN1A, SCN2A, CACNA1A, GRIN2B, GRIN2A, MECP2, FOXG1, SLC6A1, PRRT2, PTEN, KCNQ2, KCNQ3, STARD7, CLRN1 [ENSG00000144285, ENSG00000136531, ENSG00000141837, ENSG00000273079, ENSG00000183454, ENSG00000169057, ENSG00000176165, ENSG00000157103, ENSG00000167371, ENSG00000171862, ENSG00000075043, ENSG00000184156, ENSG00000084090, ENSG00000163646] (genetic epilepsy disorders); ATM [ENSG00000149311] (Ataxia-telangiectasia); GLB1 [ENSG00000170266] (GM1 gangliosidosis); GBA [ENSG00000177628] (Gaucher disease); GM2A [ENSG00000196743] (GM2 gangliosidosis); UBE3A [ENSG00000114062] (Angelman syndrome); SLC2A1 [ENSG00000117394] (glucose transporter deficiency type 1); LAM P2 [ENSG00000005893] (Danon disease); GLA [ENSG00000102393] (Fabry disease); PKD1, PKD2 [ENSG00000008710, ENSG00000118762] (Autosomal dominant polycystic kidney disease); GAA [ENSG00000171298] (Pompe disease); PCSK9, LDLR, APOB, APOE [ENSG00000169174, ENSG00000130164, ENSG00000084674, ENSG00000130203] (Familial hypercholesterolemia); MYOC, OPTN, TBK1, WDR36, CYPIB1 [ENSG00000034971, ENSG00000123240, ENSG00000183735, ENSG00000134987, ENSG00000138061] (Open Angle Glaucoma); IDUA [ENSG00000127415] (Hurler syndrome or Mucopolysaccharidosis 1); IDS [ENSG00000010404] (Hunter syndrome or Mucopolysaccharidosis 2); CLN3 [ENSG00000188603] (Batten disease); DMD [ENSG00000198947] (Duchenne muscular dystrophy); LMNA [ENSG00000160789] (Limb-girdle muscular dystrophy type 1B); DYSF [ENSG00000135636] (Limb-girdle muscular dystrophy type 2B); SGCA [ENSG00000108823] (Limb-girdle muscular dystrophy type 2D); SGCB [ENSG00000163069] (Limb-girdle muscular dystrophy type 2E); SGCG [ENSG00000102683] (Limb-girdle muscular dystrophy type 2C); SGCD [ENSG00000170624] (Limb-girdle muscular dystrophy type 2F); DUX4 [ENSG00000260596] (Facioscapulohumeral muscular dystrophy); F9 [ENSG00000101981] (Hemophilia B); F8 [ENSG00000185010] (Hemophilia A); USHA2A, RPGR, RP2, RHO, PRPF31, USH1F, PRPF3, PRPF6 [ENSG00000156313, ENSG00000102218, ENSG00000163914, ENSG00000105618, ENSG00000150275, ENSG00000117360, ENSG00000101161] (Retinitis pigmentosa); CFTR [ENSG00000001626] (cystic fibrosis); GJB2, GJB6, STRC, DFNA1, WFS1 [ENSG00000165474, ENSG00000121742, ENSG00000242866, ENSG00000131504, ENSG00000109501] (autosomal dominant hearing impairment); POU3F3 [ENSG00000198914] (nonsyndromic hearing loss).

[0018] In some embodiments, the Replacement domain is derived or isolated from the target RNA.

[0019] In some embodiments, the Intronic Domains carry binding sites that a preferentially-targeted by RNA-binding proteins with disease-causing mutations. In some embodiments, the dissociation constant of these mutated RNA-binding proteins and the Intronic Domain is lower than the dissociation constant of the non-mutated RNA-binding protein and the Intronic Domain.

[0020] In some embodiments, the Intronic Domains carry binding sites for RNA-binding proteins that promote trans-splicing primarily in 1, 2, 3, 4, 5, 6, 7, 8, 9, 10 or more tissues but not other tissues. In some embodiments, the RNA-binding protein binding sites in the Intronic Domain are targeted by RNA-binding proteins selected from the group consisting of: DDX39, DDX3X, DDX3Y, DDX41, DDX5, DHX16, DHX8, DHX9, INTS6, DDX48, HNRNPA0, HNRNPA1, HNRNPA2B1, HNRPA3, HNRPAB, HNRPC, HNRPDL, HNRPF, HNRPH1, HNRPH2, HNRPLL, HNRPM, HNRPUL1, PTBP1, PTBP2, RBMXL2, SYNCRIP, CLK3, CLK4, SRPK1, SRPK2, SRPK3, ARS2, BUB3, C7ORF30, CIRBP, CRNKL1, CSDA, DNAJC8, EEF1A1, EIF3S10, FMR1, GRSF1, GTL3, IGF2BP3, IK, ILF2, ILF3, MATR3, MBNL1, MBNL2, MBNL3, MOV10, MSI1, MSI2, MYEF2, NHP2L1, PABPC1, PCBP1, PCBP2, PCBP4, PPIE, PPIL2, PPIL2, PPM1G, PPWD1, PRPF6, PSEN1, RALY, RBM15, RBM9, RBMS1, RBMX, RDBP, ROD1, SSB, THOC3, THOC4, TNPO1, TOP1MT, ZFP207, EFTUD2, LSM1, LSM2, LSM3, LSM4, LSM7, LSM8, NA, SART1, SF3A1, SF3A2, SF3A3, SF3B1, SF3B2, SNRPA, SNRPA1, SNRPB, SNRPC, SNRPD1, SNRPD2, SNRPG, SNRPN, TXNL4, U2AF1L1, U2AF1L2, USP39, WDR57, PRPF31, PRPF4, PRPF40A, RBM17, NA, A2BP1, ACIN1, ASCC3L1, BCAS2, BRUNOL4, BUD13, BUD31, CD2BP2, CDC40, CDC5L, CRKRS, CUGBP2, ELAVL1, ELAVL1, ELAVL1, ELAVL2, ELAVL3, ELAVL4, FUSIP1, HSPA1B, HSPAS, HSPA8, NCBP2, NONO, NOVA1, NUDT21, PLRG1, PRPF19, PSIP1, RBM8A, RBMS1, SMU1, SNW1, TCERG1, TIA1, TIAL1, TNRC4, WBP11, WTAP, XAB2, YBX1, SFRS1, SFRS10, SFRS16, SFRS3, SFRS4, and SFRS6

[0021] In some embodiments, the trans-splicing RNA further comprises a 5′ untranslated region. In some embodiments, the 5′ untranslated region increases the stability of the trans-splicing nucleic acid. In some embodiments, the 5′ untranslated region reduces the stability of the trans-splicing nucleic acid. In some embodiments, the 5′ untranslated region alters the localization of the trans-splicing nucleic acid. In some embodiments, the 5′ untranslated region alters the processing of the trans-splicing nucleic acid.

[0022] In some embodiments, the trans-splicing RNA further comprises a 3′ untranslated region. In some embodiments, the 3′ untranslated region increases the stability of the trans-splicing nucleic acid. In some embodiments, the 3′ untranslated region reduces the stability of the trans-splicing nucleic acid. In some embodiments, the 3′ untranslated region alters the localization of the trans-splicing nucleic acid. In some embodiments, the 3′ untranslated region alters the processing of the trans-splicing nucleic acid.

[0023] In some embodiments, the intronic domains promote trans-splicing of the trans-splicing nucleic acid in a spatially-restricted manner so that trans-splicing occurs primarily in one tissue selected from the group consisting of: muscle cells, cardiac muscle cells, neurons, kidney cells, liver cells, epithelial cells, striatal tissue, basal ganglia tissue, substantia nigra tissue, lung tissue, spinal cord tissue, cranial nerve tissue, optic nerve tissue, oligodendrocytes, astrocytes, ependymal cells, microglia, airway tissue, inner eye tissue, retinal tissue, cerebellar tissue, pineal gland, thymus gland, pituitary gland, thyroid gland, adrenal gland, apocrine gland, holocrine gland, merocrine gland, serous gland, mucous gland, sebaceous gland, naïve T cells, effector T cells, helper T cells, memory T cells, regulatory T cells, gamma-delta T cells, natural killer cells, B cells, dendrocytes and macrophages.

[0024] In some embodiments, the Intronic Domain promote trans-splicing primarily in 2, 3, 4, 5, 6, 7, 8, 9, 10, 11, 12, 13, 14, 15, 16, 17, 18, 19 or more tissues or cell types but not trans-spliced in other cell types or tissues.

[0025] In some embodiments, the Intronic Domains broadly promote trans-splicing in many tissues but do not promote trans-splicing in a tissue selected from the following group consisting of: skeletal muscle cells, cardiac muscle cells, neurons, kidney cells, liver cells, epithelial cells, striatal tissue, basal ganglia tissue, substantia nigra tissue, lung tissue, spinal cord tissue, cranial nerve tissue, optic nerve tissue, oligodendrocytes, astrocytes, ependymal cells, microglia, airway tissue, inner eye tissue, retinal tissue, cerebellar tissue, pineal gland, thymus gland, pituitary gland, thyroid gland, adrenal gland, apocrine gland, holocrine gland, merocrine gland, serous gland, mucous gland, sebaceous gland, naïve T cells, effector T cells, helper T cells, memory T cells, regulatory T cells, gamma-delta T cells, natural killer cells, B cells, dendrocytes and macrophages. In some embodiments, the Intronic Domains do not promote trans-splicing in 2, 3, 4, 5, 6, 7, 8, 9, 10, 11, 12, 13, 14, 15, 16, 17, 18, 19 or more tissues but promote trans-splicing in other cell types or tissues.

[0026] In some embodiments, the Replacement Domain is comprised of sequence derived or isolated from a human gene. In some embodiments of the compositions of the disclosure, the sequence comprising the Replacement Domain has at least 50%, 55%, 60%, 65%, 70%, 75%, 80%, 87%, 90%, 95%, 97%, 99% or any percentage in between of identity with a human gene. In some embodiments, the Replacement Domain has 100% identity with a sequence derived or isolated from a human gene. In some embodiments, the Replacement Domain comprises or consists of 2 nucleotides, 5 nucleotides, 10 nucleotides, 20 nucleotides, 30 nucleotides, 40 nucleotides, 50 nucleotides, 60 nucleotides, 70 nucleotides, 80 nucleotides, 90 nucleotides, 100 nucleotides, 110 nucleotides, 120 nucleotides, 130 nucleotides, 140 nucleotides, 150 nucleotides, 160 nucleotides, 170 nucleotides, 180 nucleotides, 190 nucleotides, 200 nucleotides, 210 nucleotides, 220 nucleotides, 230 nucleotides, 240 nucleotides, 250 nucleotides, 260 nucleotides, 270 nucleotides, more than 270 nucleotides, or any number of nucleotides in between.

[0027] In some embodiments of the compositions of the disclosure, the sequence comprising the Antisense Domain has at least 50%, 55%, 60%, 65%, 70%, 75%, 80%, 87%, 90%, 95%, 97%, 99% or any percentage in between of complementarity to the Target RNA sequence. In some embodiments, the Antisense Domain has 100% complementarity to the Target RNA sequence. In some embodiments, the Antisense Domain comprises or consists of 20 nucleotides, 30 nucleotides, 40 nucleotides, 50 nucleotides, 60 nucleotides, 70 nucleotides, 80 nucleotides, 90 nucleotides, 100 nucleotides, 110 nucleotides, 120 nucleotides, 130 nucleotides, 140 nucleotides, 150 nucleotides, 160 nucleotides, 170 nucleotides, 180 nucleotides, 190 nucleotides, 200 nucleotides, 210 nucleotides, 220 nucleotides, 230 nucleotides, 240 nucleotides, 250 nucleotides, 260 nucleotides, 270 nucleotides, more than 270 nucleotides, or any number of nucleotides in between the complementary to the Target RNA sequence.

[0028] In some embodiments of the compositions of the disclosure, the sequence comprising the trans-splicing RNA further comprises a sequence encoding a promoter capable of expressing the trans-splicing RNA in a eukaryotic cell.

[0029] In some embodiments of the compositions of the disclosure, the eukaryotic cell is an animal cell. In some embodiments, the animal cell is a mammalian cell. In some embodiments, the animal cell is a human cell.

[0030] In some embodiments of the compositions and methods of the disclosure, a vector of the disclosure is a viral vector. In some embodiments, the viral vector comprises a sequence isolated or derived from a retrovirus. In some embodiments, the viral vector comprises a sequence isolated or derived from a lentivirus. In some embodiments, the viral vector comprises a sequence isolated or derived from an adenovirus. In some embodiments, the viral vector comprises a sequence isolated or derived from an adeno-associated virus (AAV). In some embodiments, the viral vector is replication incompetent. In some embodiments, the viral vector is isolated or recombinant. In some embodiments, the viral vector is self-complementary.

[0031] In some embodiments of the compositions and methods of the disclosure, the viral vector comprises a sequence isolated or derived from an adeno-associated virus (AAV). In some embodiments, the viral vector comprises an inverted terminal repeat sequence or a capsid sequence that is isolated or derived from an AAV of serotype AAV1, AAV2, AAV3, AAV4, AAV5, AAV6, AAV7, AAV8, AAV9, AAV10, AAV11 or AAV12. In some embodiments, the viral vector is replication incompetent. In some embodiments, the viral vector is isolated or recombinant (rAAV). In some embodiments, the viral vector is self-complementary (scAAV).

[0032] In some embodiments of the compositions and methods of the disclosure, a vector of the disclosure is a non-viral vector. In some embodiments, the vector comprises or consists of a nanoparticle, a micelle, a liposome or lipoplex, a polymersome, a polyplex, an exosome or a dendrimer. In some embodiments, the vector is an expression vector or recombinant expression system. As used herein, the term “recombinant expression system” refers to a genetic construct for the expression of certain genetic material formed by recombination.

[0033] In some embodiments of the compositions and methods of the disclosure, an expression vector, viral vector or non-viral vector provided herein, includes without limitation, an expression control element. An “expression control element” as used herein refers to any sequence that regulates the expression of a coding sequence, such as a gene. Exemplary expression control elements include but are not limited to promoters, enhancers, microRNAs, post-transcriptional regulatory elements, polyadenylation signal sequences, 5′ or 3′ untranslated regions, and introns.

[0034] Expression control elements may be constitutive, inducible, repressible, or tissue-specific, for example. A “promoter” is a control sequence that is a region of a polynucleotide sequence at which initiation and rate of transcription are controlled. It may contain genetic elements at which regulatory proteins and molecules may bind such as RNA polymerase and other transcription factors. In some embodiments, expression control by a promoter is tissue-specific. Non-limiting exemplary promoters include CMV, CBA, CAG, Cbh, EF-1a, PGK, UBC, GUSB, UCOE, hAAT, TBG, Desmin, MCK, C5-12, NSE, Synapsin, PDGF, MecP2, CaMKII, mGluR2, NFL, NFH, n132, PPE, ENK, EAAT2, GFAP, MBP, H1 and U6 promoters. In some embodiments, the promoter is a sequence isolated or derived from a promoter capable of driving expression of a transfer RNA (tRNA). In some embodiments, the promoter is isolated or derived from an alanine tRNA promoter, an arginine tRNA promoter, an asparagine tRNA promoter, an aspartic acid tRNA promoter, a cysteine tRNA promoter, a glutamine tRNA promoter, a glutamic acid tRNA promoter, a glycine tRNA promoter, a histidine tRNA promoter, an isoleucine tRNA promoter, a leucine tRNA promoter, a lysine tRNA promoter, a methionine tRNA promoter, a phenylalanine tRNA promoter, a proline tRNA promoter, a serine tRNA promoter, a threonine tRNA promoter, a tryptophan tRNA promoter, a tyrosine tRNA promoter, or a valine tRNA promoter. In some embodiments, the promoter is isolated or derived from a valine tRNA promoter.

[0035] An “enhancer” is a region of DNA that can be bound by activating proteins to increase the likelihood or frequency of transcription. Non-limiting exemplary enhancers and post-transcriptional regulatory elements include the CMV enhancer and WPRE.

[0036] In some embodiments of the compositions and methods of the disclosure, an expression vector, viral vector or non-viral vector provided herein, includes without limitation, vector elements such as an IRES or 2A peptide sites for configuration of “multicistronic” or “polycistronic” or “bicistronic” or tricistronic” constructs, i.e., having double or triple or multiple coding areas or exons, and as such will have the capability to express from mRNA two or more proteins from a single construct. Multicistronic vectors simultaneously express two or more separate proteins from the same mRNA. The two strategies most widely used for constructing multicistronic configurations are through the use of an IRES or a 2A self-cleaving site. An “IRES” refers to an internal ribosome entry site or portion thereof of viral, prokaryotic, or eukaryotic origin which are used within polycistronic vector constructs. In some embodiments, an IRES is an RNA element that allows for translation initiation in a cap-independent manner. The term “self-cleaving peptides” or “sequences encoding self-cleaving peptides” or “2A self-cleaving site” refer to linking sequences which are used within vector constructs to incorporate sites to promote ribosomal skipping and thus to generate two polypeptides from a single promoter, such self-cleaving peptides include without limitation, T2A, and P2A peptides or sequences encoding the self-cleaving peptides.

[0037] In some embodiments, the vector is a viral vector. In some embodiments, the vector is an adenoviral vector, an adeno-associated viral (AAV) vector, or a lentiviral vector. In some embodiments, the vector is a retroviral vector, an adenoviral/retroviral chimera vector, a herpes simplex viral I or II vector, a parvoviral vector, a reticuloendotheliosis viral vector, a polioviral vector, a papillomaviral vector, a vaccinia viral vector, or any hybrid or chimeric vector incorporating favorable aspects of two or more viral vectors. In some embodiments, the vector further comprises one or more expression control elements operably linked to the polynucleotide. In some embodiments, the vector further comprises one or more selectable markers. In some embodiments, the AAV vector has low toxicity. In some embodiments, the AAV vector does not incorporate into the host genome, thereby having a low probability of causing insertional mutagenesis. In some embodiments, the AAV vector can encode a range of total polynucleotides from 0.3 kb to 4.75 kb. In some embodiments, exemplary AAV vectors that may be used in any of the herein described compositions, systems, methods, and kits can include an AAV1 vector, a modified AAV1 vector, an AAV2 vector, a modified AAV2 vector, an AAV3 vector, a modified AAV3 vector, an AAV4 vector, a modified AAV4 vector, an AAV5 vector, a modified AAV5 vector, an AAV6 vector, a modified AAV6 vector, an AAV7 vector, a modified AAV7 vector, an AAV8 vector, an AAV9 vector, an AAV.rh10 vector, a modified AAV.rh10 vector, an AAV.rh32/33 vector, a modified AAV.rh32/33 vector, an AAV.rh43 vector, a modified AAV.rh43 vector, an AAV.rh74 vector, a modified AAV.rh74 vector, an AAV.rh64R1 vector, and a modified AAV.rh64R1 vector and any combinations or equivalents thereof. In some embodiments, the lentiviral vector is an integrase-competent lentiviral vector (ICLV). In some embodiments, the lentiviral vector can refer to the transgene plasmid vector as well as the transgene plasmid vector in conjunction with related plasmids (e.g., a packaging plasmid, a rev expressing plasmid, an envelope plasmid) as well as a lentiviral-based particle capable of introducing exogenous nucleic acid into a cell through a viral or viral-like entry mechanism. Lentiviral vectors are well-known in the art (see, e.g., Trono D. (2002) Lentiviral vectors, New York: Spring-Verlag Berlin Heidelberg and Durand et al. (2011) Viruses 3(2):132-159 doi: 10.3390/v3020132). In some embodiments, exemplary lentiviral vectors that may be used in any of the herein described compositions, systems, methods, and kits can include a human immunodeficiency virus (HIV) 1 vector, a modified human immunodeficiency virus (HIV) 1 vector, a human immunodeficiency virus (HIV) 2 vector, a modified human immunodeficiency virus (HIV) 2 vector, a sooty mangabey simian immunodeficiency virus (SIVSM) vector, a modified sooty mangabey simian immunodeficiency virus (SIVSM) vector, a African green monkey simian immunodeficiency virus (SIVAGM) vector, a modified African green monkey simian immunodeficiency virus (SIVAGM) vector, an equine infectious anemia virus (EIAV) vector, a modified equine infectious anemia virus (EIAV) vector, a feline immunodeficiency virus (FIV) vector, a modified feline immunodeficiency virus (FIV) vector, a Visna/maedi virus (VNV/VMV) vector, a modified Visna/maedi virus (VNV/VMV) vector, a caprine arthritis-encephalitis virus (CAEV) vector, a modified caprine arthritis-encephalitis virus (CAEV) vector, a bovine immunodeficiency virus (BIV), or a modified bovine immunodeficiency virus (BIV).

[0038] In some embodiments, the trans-splicing nucleic acid is RNA, DNA, a DNA/RNA hybrid, and/or comprises at least one of a nucleic acid analog, a chemically-modified nucleic acid, or a chimera composed of two or more nucleic acids or nucleic acid analogs. As used herein, the term “nucleic acid analog” refers to a compound having structural similarity to a canonical purine or pyrimidine base occurring in DNA or RNA. The nucleic acid analog may contain a modified sugar and/or a modified nucleobase, as compared to a purine or pyrimidine base occurring naturally in DNA or RNA. In some embodiments, the nucleic acid analog is a 2′-deoxyribonucleoside, 2′-ribonucleoside, 2′-deoxyribonucleotide or a 2′-ribonucleotide, wherein the nucleobase includes a modified base (such as, for example, xanthine, uridine, oxanine (oxanosine), 7-methlguanosine, dihydrouridine, 5-methylcytidine, C3 spacer, 5-methyl dC, 5-hydroxybutynl-2′-deoxyuridine, 5-nitroindole, 5-methyl iso-deoxycytosine, iso deoxyguanosine, deoxyuradine, iso deoxycytidine, other 0-1 purine analogs, N-6-hydroxylaminopurine, nebularine, 7-deaza hypoxanthine, other 7-deazapurines, and 2-methyl purines). In some embodiments, the nucleic acid analog may be selected from the group consisting of inosine, 7-deaza-2′-deoxyinosine, 2′-aza-2′-deoxyinosine, PNA-inosine, morpholino-inosine, LNA-inosine, phosphoramidate-inosine, 2′-O-methoxyethyl-inosine, and 2′-OMe-inosine. In other embodiments the nucleic acid analog is a nucleic acid mimic (such as, for example, artificial nucleic acids and xeno nucleic acids (XNA).

### BRIEF DESCRIPTION OF THE DRAWINGS

[0039] FIG. 1 is an illustration of the unmet need addressed by the present invention. FIG. 1A indicates that human disease can affect some tissue and not others, or can primarily occur in some tissues compared to others. FIG. 1B demonstrates that therapeutic activity in a patient typically occurs in not only affected tissues but also unaffected tissues. FIG. 1C demonstrates the present invention which limits the activity of a trans-splicing therapeutic to the target tissue and not others.

[0040] FIG. 2 describes an example embodiment of the present invention along with a schematic to illustrate the activity. FIG. 2A describes, in general, human disease caused by genetic mutations. FIG. 2B describes a example embodiment of the present invention that involves 2 antisense domains, 2 intronic domains, and one replacement domain. FIG. 3C describes the tissue-restricted activity of the present invention so that trans-splicing occurs only in the target tissue resulting in replacement of the defective RNA sequence (top box).

[0041] FIG. 3 is a non-limiting illustration of the origin and structure of intronic domains in some embodiments of the present invention. FIG. 3A illustrates intronic domains that are taken from a gene that experiences tissue-specific alternative splicing of an adjacent exon. FIG. 3B illustrates intronic domains that are composed of combinations of introns derived from genes that experience tissue-specific alternative splicing of adjacent alternative exons.

[0042] FIG. 3C illustrates intronic domains that are composed of combinations of sequences that comprise binding sites for RNA-binding proteins that promote tissue-specific splicing patterns.

[0043] FIG. 4 provides a schematic of an experiment that results in identification of intronic domains that promote tissue- or cell type-specific trans-splicing. FIG. 4A illustrates that two functional components of the experiment: a reporter that reveals tissue-specific trans-splicing activity and a trans-splicing RNA that carries the candidates intronic domains. The reporter carries a promoter and incomplete coding sequence for GFP (N-terminal and C-terminal portions of GFP or “N-GFP” and “C-GFP”) that requires the internal section of GFP from the trans-splicing reaction to form a complete and fluorescent GFP protein. The trans-splicing RNA carries this internal GFP section (“int-GFP”) that is flanked by intronic domains and antisense domains. When the reporter is transfected into a human cell, there is little or no GFP signal (FIG. 4B, top). When the reporter and trans-splicing RNA are co-transfected in a non-target cell type, there is similarly little or no GFP signal (FIG. 4B, middle). When the reporter and trans-splicing RNA are co-transfected in a target cell type, GFP signal is produced (FIG. 4B, bottom). In this manner, intronic domains that promote trans-splicing in target cell types or tissues but not others can be identified.

[0044] FIG. 5 provides a schematic of an experiment that results in identification of trans-splicing systems that reverse the molecular caused of disease LGMD1B specifically in muscle tissue. FIG. 5A describes the LGMD1B reporter that carries that characteristic mutation near exon 9 of gene LM NA that promotes inclusion of exon 9 and resulting premature termination of the coding sequence. To reverse this disease-causing mutation, the trans-splicing RNA (FIG. 5A, bottom) targets exon 9 and replaces it with a short replacement domain that does not contain a stop codon (FIG. 5C, bottom). In a non-target cell type, the system is not active (FIG. 5B, top). In this manner, a high-quality trans-splicing system that can efficiently replace this defective sequence in LMNA can be identified.

### DETAILED DESCRIPTION

[0045] This disclosure provides a therapeutic combination of replacement of disease-causing RNA sequences and tissue-restricted therapeutic activity. Specifically, the disclosure provides compositions and methods for specifically targeting disease-causing RNA molecules in specific, chosen tissues and replacing disease-causing RNA sequences within these RNA molecules. In particular, the disclosure provides a composition comprising a nucleic acid sequence encoding a trans-splicing therapeutic systems comprising (a) at least one domain that promotes trans-splicing in a tissue-restricted manner, (b) at least one binding domain that consists of a sequence complementary to a pre-mRNA present in a human cells, and (c) one coding domain that is inserted into the Target RNA via trans-splicing, wherein the target RNA causes disease, and wherein the intronic domain promotes trans-splicing specifically in chosen tissue but not others, and wherein the replacement domain encodes a non-mutated sequence. This disclosure provides vectors, compositions and cells comprising the trans-splicing compositions and methods of using the trans-splicing compositions.

### Intronic Domains

[0046] Compositions comprising intronic domains disclosed herein include any sequences that promote trans-splicing in a manner restricted to specific cell or tissue types or groups of cell or tissue types.

[0047] Compositions comprising intronic domains disclosed herein include any sequence that promotes trans-splicing primarily in brain tissue. In some embodiments, the intronic domains are derived or isolated from human genes that experience brain-specific alternative splicing events. Exemplary intronic domains that promote brain-specific trans-splicing include without limitation genes such as: UBB, GFAP, STMN1, RPL13A, UCHL1, TUBB2B, ALDOA, LRRC75A-AS1, DYNLRB1, TPI1, PKM, NDRG2, MT3, RTN3, SKP1, RTN1, NRGN, DBNDD2, BSCL2, ALDOC, S100B, GNG3, FXYD6, PRDX1, HSP90AA1, SRP14, ATF4, NDUFB8, CAPZB, ATF5, ADD1, ERGIC3, GUK1, DCTN1, GSN, MORF4L1, GNAI2, SPP1, CRIP2, RNASE1, EIF4G2, PAQR6, DCTN3, CALB2, COMMD6, MEST, STXBP1, CLDND1, SH3GLB2, NREP, ABCA2, SUN2, UBXN6, DBI, CDK2AP1, NFIX, SF1, HNRNPF, GPM6B, SQSTM1, MOBP, ANAPC11, POLD2, SAMD4B, IST1, TPD52, SHD, STK25, ABR, PQBP1, PHB, SEPT9, S100A13, APBB1, RANBP1, ARHGEF2, DLGAP4, GNAO1, SEZ6L2, FDFT1, CBX1, EIF4G1, FAM213A, MAPK8IP1, PSME1, CCAR2, TKT, SYN1, OGDH, OCIAD1, SLC3A2, SLC1A5, PTTG1, DNM1, MAP6, KDM1A, PTN, FN1, CSNK1E, TMEM9, MATR3, AHCYL1, ATP6V0A1, CDIP1, CYFIP2, SLIRP, SCG5, TPX2, DMTN, SSBP1, PFKL, KIAA0930, CAMTA1, PRC1, CHTF8, TMPRSS3, BIN1, CCT8, AMZ2, TM7SF2, SEC11A, CLPTM1, AMPD2, DHX9, GAB2, CLTC, PSME3, RPP21, DYNC1I2, CDC20, NOSIP, ATP13A2, AIF1L, SURF4, PTPRN2, STK24, SDR39U1, HMOX2, UBAP2L, NRCAM, CCDC3, GPT2, TNPO2, NRXN2, PPP1R7, CAMK2A, UBE2L6, DBNL, ADAR, RNF220, MCM2, DTNA, PDIA6, PSMG2, URM1, SNX17, SV2A, SPG21, REEP2, HSD17B4, GSTO1, TRAPPC3, ZNF385A, SHISA5, FAM107B, MID1IP1, SERPINE2, CDK5RAP3, COMMD4, ANAPC15, CABP1, PTPRA, NPTN, RERE, VPS29, SPTBN2, MT1G, DTX3, GOLGA7, TPD52L2, EPB41L3, SPIN1, FARP1, NUP62, CNOT1, TMEM108, DUT, MAPRE2, PSD, NEBL, UBE2L3, KIF5C, TCF19, WDR54, CPSF7, GIT1, L1CAM, ITPR3, RHPN2, HMGA1, KCNAB2, HID1, SHF, CD99L2, C19ORF25, PAF1, B4GALT2, PTGES2, CAPG, SEMA4D, TTYH2, EXOC7, CNDP1, TACC2, BACE1, GABBR1, LMNB1, SLAIN1, GLG1, APBA2, CADM3, PC, PHLDB1, HHATL, SOGA1, CNTNAP2, RFC2, MAPK8IP3, CD200, REC8, TACC3, SYT13, SRP68, KLC4, CORO1C, ATPAF1, NARF, AP3B2, NUP93, FAM102A, SCN1B, NDUFS2, CBFA2T2, PSMA5, EPB41, and BCAR1.

[0048] Compositions comprising intronic domains disclosed herein include any sequence that promotes trans-splicing primarily in liver tissue. In some embodiments, the intronic domains are derived or isolated from human genes that experience liver-specific alternative splicing events. Exemplary intronic domains that promote liver-specific trans-splicing include without limitation genes such as: ORM1, ORM2, PLG, ALDOB, CYP2C8, CPS1, ADH4, PON1, CFHR3, C6, DBI, ITIH3, ITIH4, C4BPB, PTGR1, C5, LBP, PRDX1, HPD, UBB, HPR, ADH6, RPL15, CXCL2, DPYS, HAL, SLC39A14, AQP9, SERPINA10, ADH1A, HABP2, SERPINF2, ECI2, APOM, KLKB1, ACSM5, SLCO1B3, ASGR2, IL1RAP, PSMA1, GRB14, LRRC75A-AS1, BCHE, EPHX1, DMGDH, MST1, ACSM3, SEPT2, TFR2, NDUFC1, NR1H4, AFMID, HNMT, TTC39C, RDH16, GPAM, SLC13A5, SERF2, PICALM, PCSK6, TOM1L1, ANPEP, EBNA1BP2, RCL1, DEPDC7, BTG1, KRT8, ABCA6, GJB1, KMO, HSD17B13, LEAP2, PECR, LEPR, CTNND1, ENSA, MASP2, KYNU, ABCB4, DNASE1L3, ACSL5, UBE2V1, SPTBN1, RBPMS, RAB13, IL1R1, SERPINA5, FGGY, TMEM220, ACSS2, VNN1, CTAGE5, MS4A6A, MFSD2A, SKAP1, VDAC2, SLC22A7, PPP2R5C, SORBS2, CDV3, CSAD, TRPM8, TOMM5, SLCO2B1, MICU1, NCOR1, GSAP, CBWD5, ENPP1, SPATS2L, FKBP5, NR3C1, IGF2, IGF1, PLSCR4, MYLK, SLC27A5, ALDH5A1, TXLNGY, PSMB5, MOCOS, PET100, SGK1, AZ12, TJP2, FMO4, STEAP1, DMD, RNF14, RBM34, PABPC1L, ZCCHC9, ANO6, AGMAT, MASP1, IL17RB, MRPS27, MLIP, MON2, ETF1, SULT1B1, GBP7, PRKACA, PI4K2B, SP100, TMED6, NFU1, RMDN2, IP6K2, CCNB1IP1, PCBP1-AS1, SLC39A1, and PHF11

[0049] Compositions comprising intronic domains disclosed herein include any sequence that promotes trans-splicing primarily in heart tissue. In some embodiments, the intronic domains are derived or isolated from human genes that experience heart-specific alternative splicing events. Exemplary intronic domains that promote heart-specific trans-splicing include without limitation genes such as: TNNI3, TNNT2, MB, FHL2, CSRP3, FHL1, UBB, MYOM2, CD36, GSN, PDHA1, CRIP2, POPDC2, SORBS2, CPT1B, RYR2, ANXA11, ITGA7, SORBS1, NDUFC1, NEXN, MYH7B, ABLIM1, NEBL, CAST, NME2, CYB5R3, TRDN, TACC2, NDUFA5, MYL12B, FHOD3, CALCOCO2, NCAM1, GPD1L, SGCA, AQP1, AKAP1, ARL6IP4, LRRC39, TTN, TSC22D1, PPP1R12B, OBSL1, MYO15B, PKIG, HMOX2, CDK18, BTNL9, ITGB1BP2, SEPT2, CAV2, DTNA, C15orf41, ATP1A1, BCO2, MYL4, ADCY5, CLIC5, SLC8A1, RRAD, AKAP13, AK3, MYO1C, FGF12, LAMA5, ADAM15, WNK2, SUN1, KLHL7, RNF207, HIF3A, HSPG2, LPCAT4, ADH1B, ENY2, RGS3, FRMD3, CCNB1IP1, PHC2, STAB1, HAND2-AS1, PTPN3, PARVB, PKD1, SPEG, SYNE2, ZNF638, SEPT4, DAG1, SLC12A7, FBXO18, FAM107A, RBM17, MYPN, GRIP2, SCN5A, WFS1, RABGAP1L, SYNE1, HLA-DRB5, SNRPN, MEG3, RAPGEF3, SEC13, C1QTNF1, UCKL1, FRY, IP6K2, CUX1, ANK3, MYH14, ADCY4, C3orf18, MYLK3, PXN, TSPAN18, PDE1C, C6orf48, BCS1L, ATG4D, HRAS, TENM2, PLXNB1, N4BP2L2, TNXB, LTBP1, MAPK8IP3, COL1A1, GCAT, ACOT11, MTUS2, VPS45, and KCNIP2.

[0050] Compositions comprising intronic domains disclosed herein include any sequence that promotes trans-splicing primarily in muscle tissue. In some embodiments, the intronic domains are derived or isolated from human genes that experience muscle-specific alternative splicing events. Exemplary intronic domains that promote muscle-specific trans-splicing include without limitation genes such as: ALDOA, TNNT3, MYBPC1, ATP2A1, NEB, STAC3, CMYA5, MYH7, TNNI1, CA3, ASB5, PLIN2, TRDN, OBSCN, RYR1, RAP1A, SPARCL1, CSNK1A1, NPEPPS, AKR1C3, IDI2, MBNL1, FNDC5, TMOD4, ATP6V1F, DAP3, KPNB1, NOMO2, BEST3, HP1BP3, SEPT2, TIMM23, MYPN, DHRS7C, PALLD, POLR2J3, KANSL3, THOC7, MEF2C, NOMO1, YWHAZ, ZBTB16, SPAG9, CCZ1, MYLK2, ASAH1, GTF2I, CCPG1, SURF4, SMARCA2, CLTCL1, SLC6A6, CHRNB1, MAFG, COMMD6, SLC7A8, CDK11B, and DNASE1L1.

[0051] Compositions comprising intronic domains disclosed herein include any sequence that promotes trans-splicing primarily in retina tissue. In some embodiments, the intronic domains are derived or isolated from human genes that experience retina-specific alternative splicing events. Exemplary intronic domains that promote retina-specific trans-splicing include without limitation genes such as: ADGRV1, AMPH, ATP1B2, BSG, CASK, CC2D2A, CEP290, CLTC, DMD, DOC2B, EFR3A, ERP44, FARP2, FN3KRP, GRAMD1B, GSS, HCN1, IFT140, IMPDH1, INTS13, KCTD5, KIF1B, KIF1B, KMT2D, MADD, MAN2A2, MARCH1, MSI2, NAP1L4, PPP3CC, PROM1, PTPRF, PTPRF, RIMS2, SLC17A7, SLC4A7, STXBP5, TTC8, UNC13B, UNC13B, WDR47, and YKT6.

Intronic Domains that Promote Trans-Splicing Primarily in Brain Tissue

[0052] In some embodiments of the compositions of the disclosure, there may be an intronic domain that promotes trans-splicing primarily in brain tissue.

[0053] In some embodiments of the compositions of the disclosure, the intronic domain is derived or isolated from human genes that feature exons that are primarily included in brain tissue during the process of RNA splicing.

[0054] In some embodiments, the intronic domain that promotes trans-splicing primarily in the brain comprises or consists of sequences from the gene PSMA5. In some embodiments, the sequences from gene PSMA5 comprise or consist of:

(SEQ ID NO: 1)
CGAAGGGACTCGTCCGCGGCGCCGGCTCAGACCCACTGTAGCCGA
CTCATTACCGCCCAAAGTCCTGGAGCCCTCGACCGGGCATGGAGA
ACACCGTGGAGGAACCCTAAGAGAGGGAATCCTGCGAAGAGAAGT
CAGGTGGTGGCCTTGCCGGAAACGGGACCAAAGTCCTCTAGCTGG
GATTACGGGAGCCGGCGAGGGACCTATTATGTCAGGGTTCAGACA
ACCCAGCTCTGCATGCAAGCCTTTCCAATTGCCAGTCTTGGGGCG
GGCTCACATCTTCTCTACAAGGCGAACTCACTACACGCCTTGGGT
GCCTATCGTCCCTAGCAACCACCCGCGATTTAAGGCGGAAGTACC
TCCCTGGTCCTCCTCCTCCTCCGGACCAACCAAGCCCTCGTGAGG
AAGCGCGTTGGCCCAATCACCTAGGCGGGAACTACTACCAGCCAA
TAGGAAGCAGGCACAGGAGGGCGGGCTAAAGAGGTCGCGGTCGCA
CGCG

[0055] In some embodiments, the intronic domain that promotes trans-splicing primarily in the brain comprises or consists of sequences from the gene GUK1. In some embodiments, the sequences from gene GUK1 comprise or consist of:

(SEQ ID NO: 2)
TCAAGCGACCGTCCCACGTCAGCCTCCCGAGTAGCAAGGACTACA
GGCACAAAAAAGTTTTTAAATTTTTTGGTACAGAAGGGGTTTCCC
TATGATCCCCAGGCTGGTCTCCAATTCCTGGCCTCAAGCGGTCCT
CCCGGCTCGGACTCCCAAAGAGCTGGGATCACAGACGTGAACCAC
GCGCCCGGCCACATTCCCCAATTAATGGTTTTTGGAGAGTGGCCG
GTTTGGAACGGGCTAGCGGAGTCGTTCGTTAGTTAGGTCCCTGCA
GTGTAGATGGAGGACGGAAACGGCGCTGTGACATAAGCGGGAGGA
GGCGGGCTGAGGCAGCGCTGTGACGTAGCAGATGAAAGCCGGGCC
CGCGCTGCACTGAGGTACTTCTCTGAGTGACAAGCGGGACAAGTA
CGCCGTGGGCGGGGCCGGCGGGTCGTGATGTTAGTTCGCGCTGTG
TGGAGGCGGGCCGGCGTGGCGCTGTGACGCAGCGGGAGAAGACGG
GCTG

[0056] In some embodiments, the intronic domain that promotes trans-splicing primarily in the brain comprises or consists of sequences from the gene KCNAB2. In some embodiments, the sequences from gene KCNAB2 comprise or consist of:

(SEQ ID NO: 3)
GGCGCGGCCAGGCGGGGTCCGCGGACTCCGGCCTGGGAAGGATGC
GCGCGGACTAGGGCGCGGGGAGCCAAGGCCCAGAACATCGGTACC
GCGCTCCCTTCAGCCGAGGGGCTGCAGAGAGGCCAGGGGGCAGGG
GGCAGGGGGCAGGGGGCAGGGGGCAAAGGGCAAGGGCAGAAAGGA
ACCCACGTAGCCAAACGGCACCCAGCGGCCCCGACCCCAAGTGTC
CCGACGAGGGGGGACGCCTGCGACTAACGCGGGGACAGCCCCCGC
CGCGCGCCACCGCCGCACCCCAGGCACCGGGCCCCCACGCAGGGA
CGGCGTGGACCACCCTACCCCCGAACCCCGAGGCTCTGGCCAACA
CTGAGGCCCCCTGTGCCTCGAGGCCGCGTCCAACCTCCCCCGCGG
CGCCGGCCCACATGGTTCCGCCCGCCGCGGGCCGCGTTACCTAGG
AGACCGACCCGCCGCGGCCGCGCCGGAGGCCACGGAGCCCACGCT
TTTC

[0057] In some embodiments, the intronic domain that promotes trans-splicing primarily in the brain comprises or consists of sequences from the gene KCNAB2. In some embodiments, the sequences from gene KCNAB2 comprise or consist of:

(SEQ ID NO: 4)
TGAGTACCGGGGAGACCCCGGCGGGGCGCGCTTTCCACCAAGCTG
CTCCGGGACGGCGGCGGCGGGTATCCGCGAGGCCCGCGCTGCGGC
AGGCGCCGCGGTCCCGTCTCCATCTCTTCTTCCCCGGCCCTGCGT
CCCTGCCTCCGCCGCTGTCTCACCTCCTCTCCAGCCTCCTCACCT
CCTTCTCCATCGTCTCCCTTCCCCCATCCCTTTCTGTCTTTCCTT
CCCTGTCCTCCCGCCCGCCCGACCCTTCAGCTCGCATCCCTGACC
CCTGCCCCTGCCGCCGTCCCTCTTCCCGGTGCACCTCTTCCCCAT
CTCTGCCCGCTCCGGTCCTAGCAGCCTCGCCCTCCCCTTTCCTCC
ATCCTCCTCTCATCCCCTCTCCCGGCCTCTGCGCAGCCCCACCGG
GGCGCTGCTGTTCCCGGTCCTCCCCATCTCTCCTCCTGATCGCTT
CTCAAGGCTCATCCGTCGTTCTCGCTGCCTGTCCCTGTGTCGCTC
CGGT

[0058] In some embodiments, the intronic domain that promotes trans-splicing primarily in the brain comprises or consists of sequences from the gene CAMTA1. In some embodiments, the sequences from gene CAMTA1 comprise or consist of:

(SEQ ID NO: 5)
CGCCCCACCCTGTCCCCCCTGGTTGGGCTCGTACCGGCCAGGGCC
CCCTGGCCAGGAAAGGTCTGTAGCATGTATGTTTCATGTGTTTAA
TGAATTCTGTAACCATCAGCCATTCCCTGTACCCCAAAGGGTCTT
AACCTAGGCTCTAGGAATGAACTACAGAGTAACTCCAAGCCCCTA
AAATTATAGGAAAATGCATACGTAGGTACATTTCCCTGGTCCTTG
GCTGTCCTGGGTTCTCGACGCCTCTATGGCTCCCGGAGGGTAAGG
CCCCAGCTGCCCATCGAGTCTGCCGGCTGGTGTGTCCCCACGGGG
CTTCGTAGGTGCTGTCCCAGAGCCTTAGTCTTGGAGCTGGAGCCA
GACGCAGAGGTGCCCTCGGTCTCCCTGGGCCGCTGCCAGGCGGCT
GTGGCCCCTTCTTGCTCCTTCTCTGTTGCGCCGTCTTCCTTCCTT
CCTTCCTTCCCTCTTTCCAACTGAATTCTCGTTTTTCCTCTCTCC
CTAG

[0059] In some embodiments, the intronic domain that promotes trans-splicing primarily in the brain comprises or consists of sequences from the gene CAMTA1. In some embodiments, the sequences from gene CAMTA1 comprise or consist of:

(SEQ ID NO: 6)
TAGGTGGCTGGGACTGGATTCTTCTTCTGTCTCTGGTGCTCGGGA
AGGGTCTGTGGAGGGCACTGAGGGCGCGGGGCTCCGCATGCGACA
CGGCTTCGGGCTGAGAGCCCTGGTGAGCTTGCCTAGGGAGACTTC
GGCTGTTGCGGCACTGAGGCCAGCTCAGTGGCTGGGCTGGTGTTG
TCATGTGTCAGGAAGGGGAGAAGGCCTGGTGGCAGGGGTAGCTGT
CACCCACTGATGGGAAATAAACCTAGGTGCTTCCAGCTTCCAAGG
CGCCTCAGTTTTCTTTTGATGAGGACAAGAAAGAAGGCCGAGTAT
CCTGCCCTGAAATGCCTGTTGGCTGAAAGCTGTACATTCATTTTC
TCTCATGGGTTAGTTACAAGGCACATGTGGAAAACAGGCTCCCGG
AGGTTGCCAGGCACAGCTGGATTGATTGGGATAGCTGTGGGGAAA
GGAGGAAGGAGCTCCGTAATCGATTTGTGATGTCTGCTGTGGCAG
GGAT

[0060] In some embodiments, the intronic domain that promotes trans-splicing primarily in the brain comprises or consists of sequences from the gene RERE. In some embodiments, the sequences from gene RERE comprise or consist of:

(SEQ ID NO: 7)
GTCAGTATTTGAAATTTTCTCCTTGAGTGGCTATTATAAGAGGAT
CCCGTAAGAATTGATTACTGTGAAATTAGCCAACTACATAGTGTA
TTTCAAAGATAAGGTAAACTGTTGGACTTGTGATTACCTGGTTTC
TGGTATGAATTACTGAACTTATGTTTGTTTTTATGTGCATAGATA
AAGCTATATGCTTGATACTCTTTCAATTATAAACTTAATGGGTTA
TAAGAATTTATAACTTGGGCTTCATTAAGTGAAGAAGGCGCTCTT
ATACTTTGTCTTTTTGTTTTGTTTTCTTTTTTTTTTTCCTTCTTT
TGAGACAGGGTCTTGCTTTGTTGCCCAGGCTGGAGTGGTGCAATT
ATAGTTCACTGCAGCCTTGACCTCCTGGGCTCAAGCGATCCTCCC
ACCTTGGCCTTCCAAAGTATTAGGATTACAGGTGTGAACTATCAT
GCCCGGCCTAATTTATCTTTGTTAAGCTTCACCTGTTCTGTTGAT
GATA

[0061] In some embodiments, the intronic domain that promotes trans-splicing primarily in the brain comprises or consists of sequences from the gene RERE. In some embodiments, the sequences from gene RERE comprise or consist of:

(SEQ ID NO: 8)
GCCTCCTGGGTTCTAGCAATTCTCCTGCCTCGGCCTCCAAAGTAG
CTGAGATTACAGGCGCCCGCCACCATGCCCAGCTAATTTTTGTAT
TTGTAGTAGAAACGGGGTTTCACCGTGTTGGCCAGGCTGGTCTCG
AACTCCTGACCTCAAGTGATCCGCCCACCTCGGCCTCCCAAAGTG
CTGGGATTACAAGCGTGAGCCACTGCACCCGGCCTTCCTGCTTCT
TTATGTTCCGCTATCCGATCCTCACAGCTTCTTTAAACCTTCCTA
ATATTGAGAAACATACCCGATGTAAGACACTGTTAAAAAGAATCC
AGCATCTGGGGGAGGTGTTAGGGAATTGAATGTTGCTAAAGCACC
AAAGAGAGAGGAGTTTGACTATTTTGAGCTTGTCTGTGACACCTG
TTTTGTTTGGAAAATGCTAATGAAACTAGTTGGCAGAGCTGCATT
TTTGAAGTTGTTTCATTTAGTCACAGTGATAGTCATCTGTCTTCT
TTTA

[0062] In some embodiments, the intronic domain that promotes trans-splicing primarily in the brain comprises or consists of sequences from the gene ATP13A2. In some embodiments, the sequences from gene ATP13A2 comprise or consist of:

(SEQ ID NO: 9)
GTGAGGCAGCCCCATTGCCCCTTCCCAGAAGCCCCTGCTACCCTG
GCCTCCCCAACTTCCCCAACCCTCGGCCCCCCCATAAAGGCTGAC
TCTGGCGCCTCCCATCCTAGGGAGGGAAGATGGCTCTGTGAGCAC
AGGGAGGTGCCAGGGCAGCTCCCAGAGCTCGAGAGTAACCCTCAC
CTGCTTCCCCAGCCTGGAGCCGTCCCCACAGTCCCAGGCAGAGGA
TGGCCGGAGCCAGGCGGCAGTTGGGGCGGTACCAGAGGGTGCCTG
GAAGGATACGGCCCAGCTCCACAAGAGCGAGGAGGCGGTGAGTGT
CGGACAGGTGGGTTCTGAAAAAGTCCTTGCCCCTCTCTCGGCCTC
GGTTTCATGATCTGTGCAATGGGAGAGTCAGACTTCATGTTCTCC
CACCACCTTTTAGTTCTGTTGTCCCAAACATCCAGGATGCTGTCT
GAGCACGTTTACACTTTCAGGCCTCTCCCCACCTCTCTGTCTGGT
GACA

[0063] In some embodiments, the intronic domain that promotes trans-splicing primarily in the brain comprises or consists of sequences from the gene ATP13A2. In some embodiments, the sequences from gene ATP13A2 comprise or consist of:

(SEQ ID NO: 10)
CTCGCTGCGTTCGCAGAGGCTCAGCGGCTACTGTGGCAGTCCATG
GAGGGTCATCGGCTATCACGTCGTGGTCTGGATGATGGCTGGGAT
CCCTTTGCTGCTCTTCCGTTGGAAGCCCCTGTGGGGGGTGCGGCT
GCGGCTCCGGCCCTGCAACCTGGCCCACGCCGAAACACTCGTTAT
CGAAATAAGAGACAAAGAGGTGAGAGTCAGGCTGAGCCTGGGGCT
AGAGAAGCGCAGTGAGGGTCAGGGTCGGGGGTGGAGGATGCTTGG
GTGCCAACCCGGCCACTGACTTTCCATGGGACATTAGGCAGGTCC
CGCTCTTCTCTGGACCTCAGCTTTCCCATCTGAGCATTGGGCAGA
AGGGACGGGTCGGGTGGTTTCTGGAGGGCTCTCCATAGCCTTGAT
TTCTGCCTTCTCCAGCAGGGGCCGCCTGGCTGTAGGACAGGGCCT
GGGAGGGGAGGGGACTCTTCTGAGACTGAGTCCATACCTCTGTGT
TCCA

[0064] In some embodiments, the intronic domain that promotes trans-splicing primarily in the brain comprises or consists of sequences from the gene CAPZB. In some embodiments, the sequences from gene CAPZB comprise or consist of:

(SEQ ID NO: 11)
GTGAGCAGAACGCCTAGGGAGAGTGCTGGCTCCGCTCGTGGTGTT
TGTTTTGGTAAAGAAGGCAGATGCTATCCAGACTTTTGAGGAACC
TGGGGTTTCACATAGGCCCCCACAGATAGACCTGCCCTCCTGCCA
CTTGACCCTTCTGCAGGACAGGCCCAGCACTTAGGTTGGAAGGGC
CAGAGAACTTCTTCCTGACAGGATCAAGGGATTTTTGGAGCATGT
TTGTATGTGGACTTTGGGCCTCAAAGTGTTTTGAGGACCATGGTT
CCTTGTTTAGTCAAGGGATGTTGCTGCTGAACGAGGGTGAGTAGT
TGAGATGGGTTAAGCTTTCTTTTGATGCCTTCCTGTATGCTGATT
AAAAACATGGGCAATGCCACTTTTAAGGCCTTCGGATTTGTCCAG
TAACTTTGGCTGAAAACTCCTTGTTTGGGGAGGTGGGCCTGGCCC
CAGGCCTTGATGGAGAACGACTTCTCCAGGGCAGTGGTGGGTGAG
GACT

[0065] In some embodiments, the intronic domain that promotes trans-splicing primarily in the brain comprises or consists of sequences from the gene CAPZB. In some embodiments, the sequences from gene CAPZB comprise or consist of:

(SEQ ID NO: 12)
AGCTGGAGTCCCACTCACTACCTCTGTGTTCAGGCTGGTCTCTCC
CATAGCCCAGGCTAGACCCTCCCTCCCGAACCGTGTCCCCAGCCA
GGCACCCCCTCGGTGACCCTGGCGTGGGCCCCCTTCCTCCCCCGG
TCTAGGGCTAGGTCTGCTTTCCCCCGTCTCTCCGGCCCAGGCTAG
GCCGTCGTTTCTCCCTGCCATGGCCCAGGCTAGGCCGCTGCCTCC
CTCTGTCCCTCCCCCTTTGCCTTCTCCATGGCCTCAGGCTGGACC
CCGGTCAGCCCCTTCTGCAGCGGCCTAGGTTTGCTTCCCCTCTTC
TCCGTGGCCTCAGCCTGAATCTCCTCTTCTCTCTGTGAACTTAAA
TCTGGACCTCCTCTTCTCCGCCCATGGCCCCCGTCTGGACCTCAC
TGCCCCCTCCCCACCATGATCCCCTTCCCTGGACTTTTCGCCACT
CCTAGCGTAACCTGCGTCAGCCCCGCTCGGTCCCCGCCCTGAGCC
TCTC

[0066] In some embodiments, the intronic domain that promotes trans-splicing primarily in the brain comprises or consists of sequences from the gene KDM1A. In some embodiments, the sequences from gene KDM1A comprise or consist of:

(SEQ ID NO: 13)
CTAGGTGGAAATGGATGGGGCCTGGTGGCTGACAATCTCACATAA
TCTCATACAACTGAGCCTCGGGTTAGAATGGTGTACCGGAGATGC
AGTCCTGTCATCTGGTGTCAGTCAAATGTGGCAGCAATCTTTTGG
TTTGGTTTTTGTTTGTTTGATTTTGTTGTTGTTGTTGTTGTTGTT
GTTACTGTTCTGTGTTTTTCCTTTCCTCTTTTGAGTTTTGCTTTA
TTCCTCACTGCTTTCTGACACTTCCCCCTCACTCCCCTGTCTTTT
GTTAACTGCCTTTCTTTTGGCCATTTCTGTGCCTTGACTTTCCCA
TTTGGTCTCTGTACAATCTGTTCCTTATTTCTCTGGTGGTTGCAG
CTTCTGAGCTAACAGAATGCTTCTGTCATGCTATGTGTTTAAAGC
CTTGATTTTATTGCTGTCATACAAAACTAAACTTGATGTGGCTGT
TGGGCTGTTATTTACAGTTTATTTCTCTCTCTGCTGCACTGGTTA
AAAG

[0067] In some embodiments, the intronic domain that promotes trans-splicing primarily in the brain comprises or consists of sequences from the gene KDM1A. In some embodiments, the sequences from gene KDM1A comprise or consist of:

(SEQ ID NO: 14)
TATTTTTTTCATAATTTTTCAAATCATTTTCCTCACTGTTTACAA
TAACCCATTAAAAGCTTGAAACCTAAATCTTTTCCTTTCAAAGAT
CCTCTCCATCATACATTCACACTGGTTTGTTGTTGTAGAGTTGCG
CCTATATGTTGGGCTGGTGCCATTTGAGTTTTTGTCATTGAAAGC
ACGTGTAAAACATTAGGTTTTTTGTGGGTGGTGTGGGTGGACTAA
GGGGGAAAGTGTAATGAATCCAGTGGGCTGCTCAGCAAACAGAGG
GAAGAAACAGGTCAAATTTGGTCCCTCTAACCTTGACAGTGTCCC
TTTAAATATTTCTCTACCACACACCCTGGACCCCAGTTACTGAGC
CTGAGTGCTGTGTACTTTTTCAGTATGAACTTCCCTTTGTGATTG
TCATCCTAGTTGCAAAGATTAAAGCTTGTCTGAAGCAAGCCATCC
AGTTGACACTGGAAGAGCTTTAATCTGTACCATTTGCACACTTGT
GTTT

[0068] In some embodiments, the intronic domain that promotes trans-splicing primarily in the brain comprises or consists of sequences from the gene STMN1. In some embodiments, the sequences from gene STMN1 comprise or consist of:

(SEQ ID NO: 15)
GTTTGAAGATGTCAGTTGCCATGTCAATTTTTATATTATTATTTT
TTCCATTTCCTGGTAATGAGATGCTATGTTATCTTTATTTATTTA
TTTATTTATTTGTTAGAGACGGGGTCTCGCTTCGTCGCCCAGGCT
GCAGGGTAGTGGCGCAACTATAAGCTCACTGCTGTCTGGAATTCC
TGGGTTCAAGTGAACCTCCCACCTCAGCCTCAGCAGCTGGGACTA
AAGGCACATAATACCACACCCAGCTAATATTTAAATGTTTTGTAG
AGACTGTGTCTCACCATGTTGCCCAGGCTATTCTCCAACTCCTGG
CTGAAGCAATCCTCTGGCCTCAGCCTCCCATATTCTTTTTTAAAC
AGCTTCTTTAGAGCACAATTTACATACCATAAAGTTGACCTCTTT
TAAAAGTGTACATTGCGCCGGGCGCGGTGGCTCACACCTGTAATC
CCAGCACTTTGGGAGGCCAAGGAGGGTGGATCACGAGGTCAGGAG
ATCG

[0069] In some embodiments, the intronic domain that promotes trans-splicing primarily in the brain comprises or consists of sequences from the gene STMN1. In some embodiments, the sequences from gene STMN1 comprise or consist of:

(SEQ ID NO: 16)
GAAGCCATTTTTCCAAGGTCACATAGAAAGCTAATGATGGAGAAT
AGACTCAAACTTGCTGCACTGCCTGAGTTTTGGATTTTCTTTTTT
TCCTTCCATTCCTTCCCTCTGCCCTTCCCTCCCACTGTCCTCCAA
TTCATATTTGTCACATGCCTACTTTGCACCAGCCCAGTACCCTGA
CCTCCTTGCCTTAGAACCTTAGGCTTCCAGAGCCTAGGTCATCAC
CACCTCTTCCTATCAAACCTCCTCCCCACACCCCGTTCCTGCCTG
ACCTTTCCTACTCGTTAAAAATCCAGATGCCTAGGTTGCTTCCCA
TACCAACAAGATCAGAATGTCTGGGGGTGGGGGCCAGGTGTCAGT
ATTTTTTAAAGATCCCTGGATGATTCCATTTGTAGCAAAGTTTGA
GAACCACTGTTTTAGCCCTGATGAAGGGCCCCTCCACCTCCTGTC
CCTTGGCCTCTGGGTTGCAGATGACCTGGTGATTTTTCTTTTTCT
TCCA

[0070] In some embodiments, the intronic domain that promotes trans-splicing primarily in the brain comprises or consists of sequences from the gene EPB41. In some embodiments, the sequences from gene EPB41 comprise or consist of:

(SEQ ID NO: 17)
AACGCCTACTGTGTACCAGACCTATGCTTGACATTTAACTTACAT
CGCTAATTCTCAGGAAAACATTGTAAGATTTATGGTTGACGAAAT
TCAGATCCAGAGAAGTGACTTGTTCAGGGTCACGCCGGACGAAGT
GGTAGGACAGGCGATCCAGGTGAGTCTCCTCAGGGTCACTTCCCT
AGATCCCCTCTGACCAACCCCTCTACCTAGTAACCTTAGGAGCAG
TACCACGTGTCAAATTGCTTCACACTTTTGTCATATGACGTCACA
CCAGTCAATCCAGGAACTCCCTGCCCTTCCCTCCCCTGACCTCTG
GGGTCTATCAAAGCAGCCCCCGGCTCAGTGTCCCCGCCGGACGAG
GCTACACCTGCAGCCCCCGCCCCTTCCCAACTGCGACTCTCGCAC
TCCTCTGCCCGGGCCTCCCCCTCCCCGCCCCGCTGATCGGCAGTT
GCCTGCGCCAATCAGAGGGCCTAGCGGGCGGGGCGGGGCCTCACG
ATGG

[0071] In some embodiments, the intronic domain that promotes trans-splicing primarily in the brain comprises or consists of sequences from the gene EPB41. In some embodiments, the sequences from gene EPB41 comprise or consist of:

(SEQ ID NO: 18)
TGAGCCTGGACCACCTGGGGGGCGACCCTCGGTCCCCGGGAGGGA
CGGGGTTAGGGACAGAAGAACCTACCCCCAAGGGCTCGGACCGTC
CCGGGAGAGGCGAGACCAGGGTCGAAGGGTCCAGGGCTGAGGGGT
CCAGCGGTCCCGAATTCCAGAATCCGAACTTGGGGTCCAAAGGAG
TCTGGGCATCTTAAAGTTCAGGGTGCAGGGAGGGGCGTGGGAGTC
TGGAGAGGGGGTCCGGGAGCTCGGATCCGGAGCTAGACACGTCCG
GGTCCGGCCGGTCCTGGCTGTCTGGGGCGGGGGTCCTGCATTCGG
TGTCCGCGGGAGAGTCCCTGCAGGTCGGCGCAGCCCCCGGCCGCC
CCCTAGCCCCGCCTTGCCCGGCCCCGCATGCTCCTGCCGGGCCCG
CAGCAGCGCTGGAGCGGGCTGGCGGCTAGCAGCGGGAGGGGGCTC
CGGGGCCTGGAGCCCCGCGCCCCGCTCCGGCCCTTACGTAACTGA
CTTT

[0072] In some embodiments, the intronic domain that promotes trans-splicing primarily in the brain comprises or consists of sequences from the gene TRAPPC3. In some embodiments, the sequences from gene TRAPPC3 comprise or consist of:

(SEQ ID NO: 19)
GGGCTTTAACATTGGAGTCCGGCTGATTGAAGATTTCTTGGCTCG
GTCAAATGTTGGGAGGTGCCATGACTTTCGGGAAACTGCGGATGT
CATTGCCAAGGTCATTATTCTGGGCCACCTGTCCATGCTGAAGAA
TTGCTGCTGAGAGGCACTGCTTACCACTCTTTCTATCTCCCTTAG
AGAGGCCTTTAATCTCCCAAAAGACTGGCTAGGCAGCTCTTTGGG
TCAAAAAAACATTCCAGGTCGTTAGGGAATAGCATAGATTATTTA
ATCCCTGTGGATTAAAGCCCCACTGAAATCAAAGCCTGAGCTTTT
CCACTGTGAAGGTGTAGCAGAGTAGCATGGGGGTAAAGAATACAG
ACTCGGTCGGGCGTGGTGGCTCACATCTGTAATCCTAGCACTTTG
GGAGGCCCAGGCGGGTGGAACACAAGATCAGGAGTTCAAGACCAG
CCTGGCCAAGATGGTGAAACCCCATCTCTACTAAAAATACAAAAG
TTTG

[0073] In some embodiments, the intronic domain that promotes trans-splicing primarily in the brain comprises or consists of sequences from the gene TRAPPC3. In some embodiments, the sequences from gene TRAPPC3 comprise or consist of:

(SEQ ID NO: 20)
CCCTGCTGCTTTGACCTTGCAGGCCAAATTTCCTGGCTCCTCCAA
AGGGGATGATGTTCTTTCCCTCCAGACACAGTTAGAGGGAATCCT
GACAGTTGCATCAAGGCTGGTCCAGACTCTCACCACGCTTTCTCT
TTTGTGCTGCTTGGTCCTGACTGCCTTTTGAATCTCTTTTAGAGC
TCTGAGCTCTTCACCCTGACCTATGGTGCCCTGGTCACCCAGCTA
TGTAAGGACTATGAAAATGATGAAGATGTGAATAAACAGCTGGAC
AAAATGTGAGTGAGCTCCTTCATAGGAGAGACAGAAATGGGGCCT
CCCAGCACACTGAGTCTACATTGTCCTTTAGAGCTTAAAACAGGG
TTCTCTCTCTTTCTTAGCCAACATTTTGGGTACATTTCTCACTAA
ACTCATTTACTGGGATGTTTTTGAGATTATCCCCATTTTCCCTTT
ACCACCAACAACCTTATGTTCAAACATAAGACATTTAGACTCCAT
CATA

[0074] In some embodiments, the intronic domain that promotes trans-splicing primarily in the brain comprises or consists of sequences from the gene CDC20. In some embodiments, the sequences from gene CDC20 comprise or consist of:

(SEQ ID NO: 21)
GTGGCACTGGACAACAGTGTGTACCTGTGGAGTGCAAGCTCTGGT
GACATCCTGCAGCTTTTGCAAATGGAGCAGCCTGGGGAATATATA
TCCTCTGTGGCCTGGATCAAAGAGGGCAACTACTTGGCTGTGGGC
ACCAGCAGTGCTGAGGTGCAGGTGAGACGTGTCCAGTGCTGTCAT
TCTCACCAGTCCCAATGGGCTTGCACAGCTGGAGGATATTAATGC
CAAGTCCCAATCTCTGATCCTAGTGGGCTTCTCTCTCTAGCTATG
GGATGTGCAGCAGCAGAAACGGCTTCGAAATATGACCAGTCACTC
TGCCCGAGTGGGCTCCCTAAGCTGGAACAGCTATATCCTGTCCAG
GTCAGTGGTTTTTGTTGGTCTATGGTAGTCTGATATTTGCCCACC
CTCCCCTTGACTGTACACCCCTGAACTGAACCAGCTCTGGCTTGC
TTGCATTTGGTGCTGCCACAGAACCTGATTCCCTTCTTTCCTCCT
CCAG

[0075] In some embodiments, the intronic domain that promotes trans-splicing primarily in the brain comprises or consists of sequences from the gene CDC20. In some embodiments, the sequences from gene CDC20 comprise or consist of:

(SEQ ID NO: 22)
TGAGTAGGGTTGGGCTGAAGCCTCTGCAGACCCTCACCTATAATC
TGGGGACTGTTAAGGGGAGAAGGGATGGTAGGATTGGACTGGGTT
AATCTGTGACCCCTAGAGCTCCTTGTCTGGCTCTAGTACCTGCTG
ACCCCACCTTTATTCCATCTAGGCCGTAGCATGGTGTCCCTGGCA
GTCCAATGTCCTGGCAACAGGAGGGGGCACCAGTGATCGACACAT
TCGCATCTGGAATGTGTGCTCTGGGGCCTGTCTGAGTGCCGTGGA
TGCCCATTCCCAGGTAATCTTTTGCCTGTTCCTGCCTCTCCCACA
TGCATTCTTACCGGGCAACTACATTCACTCCAATGGCTTCACCAA
CTCTATGCCCTGGTGATTCCCAAACTTCTAACTCAGCTCTCACTC
ATGAGCTTCATTTCCAACAGTCTGTGGCTATCTCCAATCCTATGT
CCTATAGGCACCACCACCTTGATCTGTCCCAAATTAACCTTGTCA
CTTC

[0076] In some embodiments, the intronic domain that promotes trans-splicing primarily in the brain comprises or consists of sequences from the gene B4GALT2. In some embodiments, the sequences from gene B4GALT2 comprise or consist of:

(SEQ ID NO: 23)
GGATGTATGGCTGTGGAAGTCCAGGAGCAGTGGCCTTGTTTGTGA
GTGTGGGACTTAGTGTGTTACTGTCACCCGGGTGTGTCTGTGACT
GTAGTTCTCTGTGTGTCTGAGTGTGGGTGACCAGCTGGGACCAGG
GTGTCCCTGTGATTCTGTGTGCCTGTGAGACTCACCCTGCTCCCT
GAAGCACTGCCAGAAGTGGCTGCCGCTCTCTTGGAACCACAGCTG
GAGCCATCGCCCAGGCAAGACCCCCTTCCTGCCATGCCCAGTGCT
GTGCCCATCTCCAGGCCCAAGCATCCCGTTCCGGGAATCAGAACC
AGCTGTGCTGGGCAGGACCCAGAGTCTTGGTCCCAGTCCCAAGGG
GCTGGCTTTGAGGTCTTAAGTGAGGGGTGTCCCCTGCCTTGCCCC
GTATTTTGACGTTTTGCTCCAGTGGGAAGGGATTCTGTAAACATC
CAGTCTGTATTTGGGCCCCCCGGATGCTGAGGGCAACTTCCCAGC
CTGG

[0077] In some embodiments, the intronic domain that promotes trans-splicing primarily in the brain comprises or consists of sequences from the gene B4GALT2. In some embodiments, the sequences from gene B4GALT2 comprise or consist of:

(SEQ ID NO: 24)
TAGGTGCACAGTATTCCGTCTCTTCCCTCTTCCCCAAGCCATGAG
TTCTGGGTTAAGGATGCTGCCATGTGAGGTGTCTGTTCTCAGGGG
CACAGGGGCACATGGGGGTCTATAGGTAAACATGTCTCCATGCTT
AGGTACAAACCAGTGTGGTTAGAGTTCACGTGTCTGTGTTCCTGG
GAATGCGTGAGTGTGTGTGTAGAGTTGTGCAATAAGGGTGAGTGC
CTGAGTGTGTGTGTCAGTGAGGTGGAGGAAGGTAAATGTATGTGG
CTTAGTAGTGGGGTGTGCTTGAGGATGTGAGTACTGAGTTGCCGG
GAACTGTGCCTGGGTGTCTGTTTGGAGGTAAATTCTTGAGTCTGT
GAGTGTGAAAGGGTATGAGCAGGTCAGTGTGAGGTGTGGCCCACG
AGTGTGAGCAGCTGAGTGGGAGGTAGGTGGGCAGCCTTGCCTGTC
CTGCCCTGACCTGCTGGATCTGTTTCCCTCCCACCCTGCTCAGGC
CAGC

[0078] In some embodiments, the intronic domain that promotes trans-splicing primarily in the brain comprises or consists of sequences from the gene RNF220. In some embodiments, the sequences from gene RNF220 comprise or consist of:

(SEQ ID NO: 25)
GAGAAGCATTCCAGGAACAAAGCAGCAGGTAAGATTTTTCTGGGA
AAAGACAGAGATTTTGAGGGACCCAGGATTTGGGGGTCATTTAAG
CAGCAGTGGATGTCAGTCTTCAAGCTTTGCCCATTTACTCTTGGT
CCCTTTTGGTTCAGGAAAGGAAGAACAACAAGCACGAAACCATTC
ACTGAGACCTTTGCGGGTGGGGGAGGAGGGATGTAAACAAAAGCC
AACGCTCTCTTTAGTTCACAATGGCTCGCGACCCCAAGACTTCCA
AGCTCTTTGGTGAGGGCCAGCAGGTCTGTTCTCCAGGAGTGCCCT
GGGTCTGGACTTCATTTCCCAGAGTCCCTTAGTGCCCTAATGTAT
TCAGTGCTCAGAGTGCCTGTATGTGTGTGAGTGTGAGAGAATGTG
TGCGTGCGTGTGTGTGTGCGCGCGTGTGTGTGTCTCCGAGTCCCT
GGGAGAGTGGAGGCTCATTCACTGATTAGATCCAGCGCTGAGAGG
CAGC

[0079] In some embodiments, the intronic domain that promotes trans-splicing primarily in the brain comprises or consists of sequences from the gene RNF220. In some embodiments, the sequences from gene RNF220 comprise or consist of:

(SEQ ID NO: 26)
TATGGAGATCAGAAAGGGGTGTGGACGTGTGTGCGTACCCAAGAG
GGGTGGGTGCGAGGGCGGCCGGCTTGTTCAGGAACCTGGCTAACT
TTCCGGGTCCGTTTCCTAGGGATTCGGGCGGTTCCCTCTGGACGG
GGGCAGGGACTGGGACTCGGACTGGCGCGTCTTGGATCATCGCGA
CGGAGCCTCTCGGCATCGGCGCCCTGCGCGCTCCGTGCGCTGCCT
CGCTCAAACTTTCCGTCTTGAGTTTTCCTTAATGTGTTTTATTTG
GGGAGGGGGGGAGGTGCAAGGGGGAGGGACCAGACGCGGGAATTG
GACAAGTTGGGAGGGTGAGGGCACTGCAAGGGAAGGGAGCAGGAC
TTCTTTTCTCCGTCTCTTAATAAGCCCCATTCCCACTTTGTTCGG
GTCGATATCGAGAATGCCTTCTCGCCGGGCTCTCTGGTGCACCCC
CCGGTGATTTCCGGGCTCCCCTATGTACCCCGCGTTGATTTCCGG
CGAG

[0080] In some embodiments, the intronic domain that promotes trans-splicing primarily in the brain comprises or consists of sequences from the gene PRDX1. In some embodiments, the sequences from gene PRDX1 comprise or consist of:

(SEQ ID NO: 27)
GCAAGCGTGGACTCGAGTCGAGTCTTCCCCCGGCAACTCGAGCAC
GTGGCGCGGCGTCTGGGCGGGCTGGTGGTGGGGGTCTCCGAGACT
AGCCTCCTGCCGGACGGGGTGGGTTCGGGAAGCTTCTGGAATGGA
CCTGTATCCAGACTCGTGGCTGTAGAAGACAGCCTCTATGTATTT
GGCTGTTCCGGGTCCTGAGCCTTGACTAGCTGCGGAGCTTCGGGT
ACCCTTTCCCCGTCTTTATTTTCCTGTACGTGGAATGGAGTTAGC
GATGAGCCCAAATGTCCCCGCTGAAGCACTCTCTCTGCTGGTGCT
TTCTCCAGTGCTGGGGAGGGACAGGGGGCACCTGAAGTGGGGTTT
AGGGATGTGGCCCTCTACGCTGGGCAGATCCCCTGAAGGGGCCCG
GTGGCGGCCTGAATCCCAGCAGCCTTTACCCCGAATTGGTTGGGT
TTTGTACTTGGGGGCCACTTGGGAAAGAAGGATTGGACGAGAAGG
CCAT

[0081] In some embodiments, the intronic domain that promotes trans-splicing primarily in the brain comprises or consists of sequences from the gene PRDX1. In some embodiments, the sequences from gene PRDX1 comprise or consist of:

(SEQ ID NO: 28)
AAGCGTTCGGGTTCGGGAGCGGCCACAAGGGCGCCTCACTCCAAC
CTCAGCCATCCGCAACAGGGTGGGGTATTAGTATTTTTCCGCACC
CGCCCCAACGAGGGAAAGCGCCGAGTCATTCCGGCGGGGCGCGCC
GGGCGGGGCTCGGGCCACATCCCCCTCCTCTCTCTCCTCCTCCGG
CACCCCCGTCCGTTCCGACTCTCGCGAGATCCCTACTGGCTATAA
AGGCAGCGCCCCGGAGAGCTCTTGCGCGTCTTGTTCTTGCCTGGT
GTCGGTGGTTAGTTTCTGCGACTTGTGTTGGGACTGGTGAGTGTG
GGCAGTGCGGCCCCTGCGGAGTGAGGCGCGGCGCGCCCTTCTTGC
CTGTTGCCTCTTCCTCCTCCTGTCCGGGGCCCGCCCGCGCTCGGG
TGGGGGTGCTGTGATGCGTGAGGCAGCCGGGGGAGGCCCGGAGTC
CGAGACTGCTTGAGCGCTGCGCACACCCCTCTCGTGGGCCCCCCA
CGTA

[0082] In some embodiments, the intronic domain that promotes trans-splicing primarily in the brain comprises or consists of sequences from the gene ATPAF1. In some embodiments, the sequences from gene ATPAF1 comprise or consist of:

(SEQ ID NO: 29)
GTAGTTACAGTAGAAAATTGGGATTCTACATTGTGTTTTAAAGTC
AAATTAGAGGTGTTTATTTTACTTGGAAAATACTTTTTTTGCCTT
GGGTATCCTGAATTTTAAGTGAATCTGCTGAGTCTTAATGACTAC
TACTCATCTGACAAAGGGCTAATATCCAGAATCTACAGTGAACTC
AAACAAATTTACAAGAAAAAAAAAACCCCATCAAAAAGTGGACAA
AGGATACGAACAGACACTTCTCAAAAGAAGACATTTATGCAGCCA
AAAGACACATGAAAAAATGCTCATCATCACTGGCCATTGGAGAAA
TGCAAATCAAAACCACAATGAGATACCATCTCACACCAGTTAGAA
TGGCAATCATTAAAAAGTCAGGAAACAACAGGTGCTGGAGAGGAT
GTGGAGAAATAGGAACACTTTTACACTGTTGGTGGGACTGTAAAC
TAGTTCAAACATTGTGGAAGTCAGTGTGGCGATTCCTTAGGGATC
TAGA

[0083] In some embodiments, the intronic domain that promotes trans-splicing primarily in the brain comprises or consists of sequences from the gene ATPAF1. In some embodiments, the sequences from gene ATPAF1 comprise or consist of:

(SEQ ID NO: 30)
TGAATCCTAACCCTTCCACTTACTAGCTGGGTGACTCTGAGCAAA
TTGTTACTTCTCCATGCCTCAGTTTGCTTATCTGTAAAACAGGAA
TAATAACAGTACCTACTTCACAGAGTTGTGCTGAAGAGATAATAC
CATTTAAAACTCTTTAGCGCCGTCTCTGGCATAAGTACTTAATAT
ATATTAGCCATTATTATCCTTAAATAGGAATCAAAGCTGAGGAAA
AGCATGTTGAAAACTGTGTCTGGGAAGATTATTCTAATGCAGTGT
TTTTCAAACTTTTTGACCATGACCACAATAAGAAATATATTTTAC
ATTGCAATTCAGTACACATGTAGGTATATGATTGTAACTGAAAAA
AAAATGTATAAAATAATGCTAACTTTTACAACATGCAGTCCATTC
TTATTACTTTTTATTCTCTTTCATCTTTTAAAAAACTCTGATCAC
AATCCACTAAATGTATTTCACAACCTATTATTTGAAAAATTCTAA
CCTA

[0084] In some embodiments, the intronic domain that promotes trans-splicing primarily in the brain comprises or consists of sequences from the gene PSMA5. In some embodiments, the sequences from gene PSMA5 comprise or consist of:

(SEQ ID NO: 31)
GTGAGTTGGCTGCCGGTGAGTTGGGTGCCGGTGGAGTCGTGTTGG
TCCTCAGAATCCCCGCGTAGCCGCTGCCTCCTCCTACCCTCGCCA
TGTTTCTTACCCGGTCTGAGTACGACAGGTCCGTGCAGCTGGGGG
ACGTCGGGTGGGAATTATGGGTGGGCAGGCCCGGGACCTGGCCGC
GCGGCCTGGGTTCTGCCGTGTCATGGGGCTCCCCAGGAACCCGAG
ACTGGCCGGACCTGGGGATGTTATGCCCTCCTCAGGCGCCCGCCG
TCCTTCCCCAAGCTAGACCACATCGGCGGCACTTGTCCTACCGCT
GAGTCACCCCTGGGTCCTAACTCGGTGCGGAAGCGAGAAGCTCCG
GCTGGTGCTTGGTAAAGAAGGCGTGAGGAGCCGGAACTCCTACCT
TGAACCCGGAGAAGGCCAAGGGTCACTCTTTGCTCCGTTCATCTT
TTCGTGCCTAGTATGACTGCCTTGAACAAACAAACAAAAAGTTAA
ACGT

[0085] In some embodiments, the intronic domain that promotes trans-splicing primarily in the brain comprises or consists of sequences from the gene AMPD2. In some embodiments, the sequences from gene AMPD2 comprise or consist of:

(SEQ ID NO: 32)
GGAGCAGAGCCAGAGTGTGCAGAGACAGAGGAAAAATCCAAAGAG
GCTAGGGTCTCTGTCCCAGACCCCCAGACAAGGGGGTCTCCTGGC
CTTCCTGCCTTCCTGGGAGGTAGCTATTTGGCGACGGTGGAATTT
TCCCGGGACAGGCCCCTCCCTCCTGGGCTGGGATTCTCGGTTCTT
CCCCCTCCTCCCAGAGCTGGGCTACCCCGGGAGCTGAGGGTCAGA
TGTGGAAGGAAAGTGGGTGCTGGGTTTTCACGGAGTATGCCTGCC
CTGCCCCGGGAGGACTGTGTTTGAGCTTGGACTCGCTCGCTGCTG
AATTCCTGTTTGTTATTCTTTTTTCTTCCAGGCTAGCTGGAAGGA
CCAGCTAGCCTGGACTTTGGCTTCTTTGCCCGGGAGCCCTGGCAT
GATGGGGTGAGGGCTCTTGGTGGGTTAGTGGAGAGCTGGGGGCTG
GCCCTTCCCCATCTTCTTTTCTACCCACCCCCTCCCCGCCCCCCG
CCAG

[0086] In some embodiments, the intronic domain that promotes trans-splicing primarily in the brain comprises or consists of sequences from the gene AMPD2. In some embodiments, the sequences from gene AMPD2 comprise or consist of:

(SEQ ID NO: 33)
TGAGTGTGTGCTTCCTGGCCTCAGGATAGATGCTGGGCTCTGTCT
TGCCACCTCTCGCCCAAGGTGCTGGTCCCCTCAGAGGGGGCCACC
TCCTCCGGCATCCTCTCTGTGGTGGTGCCCCTCAACCTCAGTCCC
AGGGACAGCCGGCTTGGAAGGTGGGGTGAGGGGTGGTGGGGGGCG
GGGGGTGGATCTGAGATATCTGTGCCAGGGATGCTGTCCTCTGTC
ACAAGGAGTGGGCATGGTGTGGGTGCAGCAAGAGGTGTGTATGCA
CACGTGTCAGCGTGTGCATGTGCTAAGACTGCGTGTGAAGCATGT
GTGAATGGAGCGGGGGTGTGTGGGACTGACTGTTTTGTGGACTGG
CCACTCTGACTGGCGCCTGTGCCTTTACCAGGCAGGCTTAGGCTG
TTCTGTGGCTAGTTCCACTTTTTAGGACCCCACATCTAGATCCCC
CTCACTGGGGGTCTGACATCTGGGCACAACCATTGCTGGCTGGCA
TCCC

[0087] In some embodiments, the intronic domain that promotes trans-splicing primarily in the brain comprises or consists of sequences from the gene AHCYL1. In some embodiments, the sequences from gene AHCYL1 comprise or consist of:

(SEQ ID NO: 34)
GTGACGTCACGACAGAGTGCCCTTTCTCCCCGCCTCTTCCCCCTC
CCGGGAGCTGCCAGTACTTGACGTGGCGTCACCGCCCTCTACCCT
CGCTTTGCGTGCGTGTTTGCGTACAGCGGAGGTGGCGGCGCGGGC
AGGTCGGAGCTCGGAGCTGCTGTTCTGGTTCTCTTGTGGCCGCCG
TCGCTGTCCGGCTGCCTTGGGCTGCCGAACAGACAAGGCGTGGGC
CACAGCACCTCAGAAGCCGACGCAGCTCGACGCAGGGGCCGGCAG
GAGGGTGGGCGATCGCGTGTCGGAGGGCGCCGCGCGGGCAGGCGG
GCGGGCGCCAGAGGGGGAAAGAGGCGGGGGCGGCGGGTCAGCCGC
TGGCCGGGCCGGCCGGGGAATGTCGATGCCTGACGCGATGCCGCT
GCCCGGGGTCGGGGAGGAGCTGAAGCAGGCCAAGGAGATCGAGGA
CGCCGAGAAGTACTCCTTCATGGCCACCGTCACCAAGGCGCCCAA
GAAG

[0088] In some embodiments, the intronic domain that promotes trans-splicing primarily in the brain comprises or consists of sequences from the gene AHCYL1. In some embodiments, the sequences from gene AHCYL1 comprise or consist of:

(SEQ ID NO: 35)
TGAGTGGGTAAATCTGGCAGAACTTCCATCAAATCTTTGGGAGCA
GTGGCCGCTTTATCCAACAACTGCGTGATAGCTGGGAGGCAAGAG
AAAAGAATGCGTGAAGCTAGCTCTGATATACAGGTGAAAGCGATG
AGGGTAACATGAAACTGAAAATCTATGATTTTCACTTTCTACAGC
ATTCCAATTACTTCGAAATATGTAAGAAATTGACATTTGGAGGTT
GGTGACAGCAGACACTGTCATGGATACAGGTGGATCCTAGAGTCA
TGTGAATAGATCACTTAGGCATCCCTGGAGAAAGGAGCTTGGGTG
GGTTGGAGTAGTGGGTGGTAAGGGAAGATTGCTCACTCTTGACTG
TACTTTTGAGGCAGAACAAGTTTGATCTATTGTGCTGTAGGTTGA
CTCAAAGGACACCCTTCGAATTCTCTCATAAATGGCAACCTTTGG
AGATTTTAGTCTGACTAGCTCTCCGAGTGGTGGAATTGGGATCCT
TATT

[0089] In some embodiments, the intronic domain that promotes trans-splicing primarily in the brain comprises or consists of sequences from the gene SV2A. In some embodiments, the sequences from gene SV2A comprise or consist of:

(SEQ ID NO: 36)
GTAGTTGGAATGTGTTGGAGGCAGGGCAGTGGATTCAGGGGAGGG
GTGGGGTGAGGAAGGAGGGCTGAATGGGAAGAGCATCCTTAGGGG
TGAGAGGATATACATTTCCATTTTCTCCTCTAAAATCTGGTAGCT
TTGGCCGGGCACGGTGACTCATGCCTGTAATCCCAGTGCTTTGGG
AGGCCGAGGCAGGCAGATCACCTGAGGTCAGGAGTTTGAGACCAG
CCTGGCCAACATGGTGAAACCCTGTCTGTACTAAAAATACAAAAA
GTTAGCTGGGTGCCTGTAATCGCAGCTACTCAGGAGGCTAAGGCA
GGAGAATTGCTTGAACCCGGGAGGTGGAGCTTTCAGTGAGCCGAG
ATCGCACCACTGCACTCCAGCCTGGGCAACAGAGCAAGACTCAGT
CTTAACTGTTAACCTCAATTTTTGGTCTCCTTTC

[0090] In some embodiments, the intronic domain that promotes trans-splicing primarily in the brain comprises or consists of sequences from the gene SV2A. In some embodiments, the sequences from gene SV2A comprise or consist of:

(SEQ ID NO: 37)
TCTCATGTTTTCTGTTTAGGGGGTGCTGCAGGATGGGGTGGGGAC
TGGCACAGAAGCTTCTCTGGGGGTAAAGGAGGTAAGCAGAATTGC
AAGTGGTTAGGGCACAGGCTTTGAGGTTATGGGTTTTGAATCTCA
GCTCCACCACCTGCCTCTGGCCTCTGGCAAATTACCTCTATGAGC
CTGGTTGTTTCCTCTGCAAAATGGAGGTGATAATAGTACCTGTGT
CATAGGGTTGATGTGCTAGATCAATGCATGTAAAGCATCAATTGC
CTTGGCCCATGGCTGGCATTGAATAAATGATGGTTACTGATATTA
TTAATAAACAATTATAAGGGAGGTTGAGGAGGAGTGAAAAGCCTT
CCTTTTGGATACCTTGGTTGGATACCTTCGGAACAAGTCTCATCC
TGGGCTATCTGAAAGCCAGCTGATGGGACAGGGTGGGCTGTGGGT
GGGTTTCACTGTGGCCAGGCTCATGTTGCTCTCTCCTCTCCTGGC
TCCA

[0091] In some embodiments, the intronic domain that promotes trans-splicing primarily in the brain comprises or consists of sequences from the gene S100A13. In some embodiments, the sequences from gene S100A13 comprise or consist of:

(SEQ ID NO: 38)
AATCGACCACGGAAATTTGACACCTCCGGGCTTGGAAGCAGCTCT
CTCCTCCTTCCCCGCTGCTTATAAACCTCAGCCCTGAGGCTCCAG
CTCACTCTACCCCATCTCCTTGCCGGGTGAGTCTCATGGCTGACC
CTGGAGGGAGGCTGGAGATCATTTTTTCTTCCTGGGCTCCCAGGT
CCCTCCCCCAGAGCCAGCTCAGACAGGAATTCAGGAAGGAGCTTT
GGATGATCGAGCAACAGCGCGTGCAGGAGTGTGTGACGGGGTGGA
CAGAAAAGAGAATGCCTCTTCCAGCCCCACCCGCCGCACCCCAGG
GGGTTGTGAGTGCCTGTACTAAACCCGTCCTGGAGCAGGGAGTCA
GAGACGCCCCGTTCCAGGACCCTTGTCACCGGGAGACAGGAGCGG
GGAGGATCTGTGGGGTCCTGGGTTCAGCACTCTGCCCTGCTGCCG
CTGAGGAGAGGTAAGGGTGGAGCGGGGCAGAGAAAATGGGTCTGT
TCAG

[0092] In some embodiments, the intronic domain that promotes trans-splicing primarily in the brain comprises or consists of sequences from the gene S100A13. In some embodiments, the sequences from gene S100A13 comprise or consist of:

(SEQ ID NO: 39)
TGGCTGTGCTGGTTGAGCCCGGTAAGGGGGGAATTCTGCTGAGGG
GGTCTTAGTCTGTGGCTCCTCCATGGGGCCTCACTGAGAGGACCC
TCAGTGAGAAACTTAGTCTTGGGAGTCTGAGAACCCACAGAGGGA
TTTCAATCCAGGACTCTTCTCTGGGGGTCTCAACCTGGATCCCCC
TCTGTGTGTGGGGCCTCAGCCTGGGGTTCTCTGAGGGATCTTGGT
CTGTAGCATCCTTTGTGGGATCTCATTCCAAGGGGCCTCTGTGTG
TGTCTCAGATTGGGCCTCTCAGTGTTGAGCTCCCTTGATTGGTTG
CCTCCCTCTTCCCCCCTCAGCATACACACTCCTGATTAGACATGG
GTATGGTGGCAGCAGCCCCCAGTATTGAGAGGACTAGGACCCTGG
GACCCCTGCCGAACGAGATCTGTCCAGGCAGCTCCTCTCCCTGAC
CAAGTGGGGGCGCTCGTGTGGCTGGCAGGGAGCCCGGGTCCAGAC
CTGA

[0093] In some embodiments, the intronic domain that promotes trans-splicing primarily in the brain comprises or consists of sequences from the gene UBAP2L. In some embodiments, the sequences from gene UBAP2L comprise or consist of:

(SEQ ID NO: 40)
ACTGAGGCACGAGAATCGCTTGAACCTGGGAGGTGGAGGTTGCAG
TGAGCCAAGATCACACCACTGCACTCCAGCCTGGGCAACAGAGCG
AGACTCTGTCTCAAAAATAAATAAATAAATAAATATAAATAAATA
AAAAATAAAGGACTTTACTTTTTGTAGTGATATGTATAAAATATT
TAAACAGAAGTAAAAGCAAACTAATGGAAGTGTTTTAGACATGGA
TGCTGAGTGGAGAATGGTTAAGTCAATCAGTCATCCCAGCTTTCA
TCTCTAGTGTCCTGATAGCACTCCATATTGATTAGATATGAATGC
TCTACCCTTCTATAGCATTCCTGGGAGATGGTCGGGAAGAAGAAG
GGAGTCTCAGGCCAGAAGGATGGTGGCCAGACGGAATCCAATGAG
GAAGGCAAAGAAAATCGAGACCGGGACAGAGACTATAGTCGGCGA
CGTGGTGGGCCACCAAGACGGGGGAGAGGTGCCAGCCGTGGACGA
GAGT

[0094] In some embodiments, the intronic domain that promotes trans-splicing primarily in the brain comprises or consists of sequences from the gene UBAP2L. In some embodiments, the sequences from gene UBAP2L comprise or consist of:

(SEQ ID NO: 41)
TCAGTAATGTCTAGACTCTAGGGATGTGCCAGGGCCCTGCTAGTC
AGGACCTAGGAACCATTATATTATCCTTTTGCTTTTCTTGCCGTC
GTCTGTTCTGAGACCTTGACATCTCTTGCATGTGGCCTTTTCTAC
CAACTGCCACCAGTCTGGCATGAGATTACCCTGTAGTCATTTATA
AAGTTAAATTTGACTTGCAGCTCTCCATTAAGGCACATTACCATT
CCCTGAGAAACATGTTCCCATCCTTCCAGCTCATTTTCTCTTCGT
TGTTTTTTTAATTCCCAATACCATATTACATACCATTTATATATT
TGTATATATCCTGTTGACTGTGCTCTGGCCATCTGTGGTTTGGTT
TTTTTGTTGTTGTTGTTGTTTTAATTTTTATTTTTATTTCAGTTC
GAGGTCAGGAAAATGGATTGGATGGCACCAAGAGTGGAGGGCCTT
CTGGAAGAGGAACAGAAAGAGGCAGAAGGGGCCGTGGCCGAGGCA
GAGG

[0095] In some embodiments, the intronic domain that promotes trans-splicing primarily in the brain comprises or consists of sequences from the gene ADAR. In some embodiments, the sequences from gene ADAR comprise or consist of:

(SEQ ID NO: 42)
GTAAGAGCCTCTGTCCTTCTCGGCTACACCTGCCTGGGCTGGAAC
GCGCGGCCCATGCGGCCTCTCCAGTCTCTGGCGTTGATGTTAGAG
GAAGCGTGGGGGCGCCCCGGCAGGGCACTGAGGGTGGCCGCAGGG
CTGGGTGGGGACGCAGCTGGTAGGGGCACAGTGGCCGGTCTCGGC
AGCCTTCCAGGAGGCGGACGCCCGGGCCGGTGTACTTTTGTGCGT
GTGTGCGCGCCCGTGTGTGCGCGAGTGTGGGCGGCAGAGGCTGCG
CACGGATGCTCCGGCGCTCGTGCCAGCCGGAGCCCAGCAGCTGGG
TACCAAAGGCCCAACAGCTGGGTACCAAAGGCCCTTGTTTCCCTC
TCGCCGGCTCCCCCGCCTCGGAGAGTGACTGGAGAGTGAGCTGCC
TGGGACTCGCCGCGGTAGGCGCTTTTGCTGCGCCTTCTACCACAA
ACTGCGTTAGGACCGGCCCTTTATCCCAGAGATAACATCGCCGCC
CTGG

[0096] In some embodiments, the intronic domain that promotes trans-splicing primarily in the brain comprises or consists of sequences from the gene ADAR. In some embodiments, the sequences from gene ADAR comprise or consist of:

(SEQ ID NO: 43)
TTCAGGATGGGAGTTACTTCTGATGGAGAGGCAGTGGCACAAGAT
GGGGACCACTTACAAGCTGATGAAAGTTAATTGATAATATTTTAG
TTCTTGGTTAGCATGTCAAGTTAAAGAAGGTGTTCATTATATTAT
TTTAAAAATGAATTCGTTTAATTTAATTTAAACGGGCCATTCAAA
GACTACTGGTTATAATGTATTATTGGCTAATTCTGTGGTCTTTTT
AAAAGAGGATTGTACCTACGTATCTTCTCAGGCCTTCCGGCCCAA
CCACGTTATAAATGACTAAGGAGTTCAATCAAGGCCATGGGCAAA
AATGCAGCATCCTAAACCCATGTACCTACTCCCCACTGTACCCAA
AACAGCGGCATTAACACAACGTAAAAAACCAAGGAAGACGTAGCA
ACAAAAACCTTAATTTCCTAGAGCGCAAACAAAAGAGGTTGAATC
ACGTGGTTCTTCCTCCCACGCCCGGCGCGCCAATGATGTCACCAA
TCTG

[0097] In some embodiments, the intronic domain that promotes trans-splicing primarily in the brain comprises or consists of sequences from the gene ARHGEF2. In some embodiments, the sequences from gene ARHGEF2 comprise or consist of:

(SEQ ID NO: 44)
GTAAGGGACGGAGCGGGAAGAGGGAGGTGTGTGTCTCGCGGGTGG
GGGCGGTGGAAGCTCCGGCACCTCCTCTCACCCCGGGCCCCACCG
GCTTGGGCTTGGCGTGGCGACCCCCCATCACTCCCCAATCGCTGG
CTTGGTCGTTCCCCCTTTGTCCCCGCCATCCGGCGGAGGGGACGG
GAGGGGGTGGTTTCCCGGCTTCCTCCCACCACCACCACCACCCCT
CCAAGACAAAAGTCAGCTCCTCCTCTCCTCGCAAATGGACTTTCC
AGCTGTGATTCAGTTCTCCCCTCTGGGTGGGCGGGTGGCTGGGGT
CGGGACGGCCGAGGGACGGCTTACTTCCCCCAAACCATCACCTCT
AGGTGAAGGGAGCAGAGGTCTTTGTGTAGCTGGGCTCCTTTCCTC
CATCCTGAGCCCTTCTGCCTGGAACATAGGGCCTCCATCCCTATC
TGCCCCGCCAGCCTCCTAGCTCTTCCTTCTCCCAACCTGAAACCC
TTAG

[0098] In some embodiments, the intronic domain that promotes trans-splicing primarily in the brain comprises or consists of sequences from the gene ARHGEF2. In some embodiments, the sequences from gene ARHGEF2 comprise or consist of:

(SEQ ID NO: 45)
ACAAACCCTGGCGTCCCGTCCTGCGCGCGGGCACCCCGCCCTCCC
TCCGCTCCGCCTACCCCCTTCCTGAGCTTGGGCGGGGGAGGAGAC
TCGGGTTTGAGGAACTGGTGCTGGGTGCCGGGCGAGGGGAGTCAG
ACTTCCTGTCCCCGAGACCAACGCGTGCGGGCCGAACCCCTCCCC
CCGCCTTCCCCCAACAATACAGGACGCCGGGGTCCGCGCCGCGTC
CTCCCTGGTCCCCCCGTCCGATTATGTCTCGGATCGAATCCCTCA
CGCGGGCGCGGATCGACCGGAGCAGAGAGCTGGCGAGCAAGGTGG
GCTCGGAAACCCCTCTCCTTTCGCCGCGGTCCTCGGGTGCTCCCC
GAACCCCGGCACCCGCGGTGCATCTCCTGTCTCCCCGCCTGCTTT
CTGGGCGCCAAAATCGGGCGGAGCGGTGGATCGGCGAGCGGCGGG
ACGGGGTGGGTGGGGACTGCGAGCGAGTGGGTAGGGGTGGGGGGA
GCGG

[0099] In some embodiments, the intronic domain that promotes trans-splicing primarily in the brain comprises or consists of sequences from the gene PAQR6. In some embodiments, the sequences from gene PAQR6 comprise or consist of:

(SEQ ID NO: 46)
AGATTCCTCTTCTGGAGTTTATTTGGGAGCAGCTGGGATGATGGG
GACCCCACATCCATAGGGCTGGGAGGTCAGGGCAAGGGCAAGGGG
AAGAGGAAAGAAGGGTGCCTGGAGAGGAGCAGAACTGGGGTTGCC
GGCCAGGCCAGCAGAGCGACACCCTAGACCGGGCCGTAGAAGCGC
CGATAGGCCTCCTGAAAGCCGATGTGGTCAGCCAACTCGTCACAG
TCCGGATTGAGCTCACACACCTCCCTCCTGGGCTCCAGGGGATCC
GGGTAGGGGACTGGGGCTCTGAGACACCCGACGTGGTGGCATCAG
CCCCCGTGCAAAATGCCCATCCCTCCTCTCCCTACACATGGGGCT
CCAGGGTGCCCACCAGGGCAGGCTGCCTGTACCCCCACCACAACC
CAGAGAGGCCACTCCCTGCTGCAGCTCCCCCACAGACCATCCCGG
AGAGGCAGGGCCTTGGCCCAGCTCTGCCTTTTCTCTCACCCCAGC
CATT

[0100] In some embodiments, the intronic domain that promotes trans-splicing primarily in the brain comprises or consists of sequences from the gene PAQR6. In some embodiments, the sequences from gene PAQR6 comprise or consist of:

(SEQ ID NO: 47)
GTGCTGGGGCAGGGGCCACGGCTGTGGGCAGGAGGCCCTGAGCAC
CAGCCATGGCTACCATCTCTTCTGCGCGCTGCTCACTGGCTTCCT
CTTCGCCTCCCACCTGCCTGAAAGGCTGGCACCAGGACGCTTTGA
TTACATCGGTGAGGGCACGCCTGGCCCGGCCCGGGAAGAGGCAGG
GGCAGATGCCTTCCCAGAGCACAGAATGAACTGGGTAAATGGGTA
TTACAGCCCCAGGATGGAGGCAAATTATAGGAGGGACTTCCCTGT
CTTCCTATAACGAGAGCATCACTGGAAGGGTCCTCCACCTGCCAC
TTCTCAGGTAGCAAAACTAGTAGCATGTGTGCTGGGGCCACATGC
ACACATGCTCATTCATTCCTTTCAGTCACTCTGGGAGTCAGGGTT
TCTTATTCTCAATTTATGGGGGAGTAGCAGGCCCAGAGGATGGGG
TGACTTGCACTGGGAAAGGTGTGGCTCTGACCTGCCCATCCTCTC
CACA

[0101] In some embodiments, the intronic domain that promotes trans-splicing primarily in the brain comprises or consists of sequences from the gene CADM3. In some embodiments, the sequences from gene CADM3 comprise or consist of:

(SEQ ID NO: 48)
AGTATCTCATGAGTTATCTTTCTCCGTGAAAACCATGGGCTAGAG
AAGGGGACTGCAGACACCGAGGGGAACTGTTCCTGTCATCCAGAG
GCTGAGAAACATGGTGGTCTGCTGTTTGAGGATGTAACAAGCCAT
GAGTTCCCCAACTGGTTCCAGTATTGCAGCTCTGATTTACAGCAT
GCATAATCTTACAGGGTTCTGGAGTGACTTCACCCCACAGGAGGA
ACTCTAACAGGAAGCTGAAGTCAGTGTTGCCCTAGGTATCTGACA
ATGAAGCTCACGAAATCCAAACTATTTTCTGAGTAGCTCTTAGGC
TACTATGTCTAATGACCCAGAAAAGTGATTGAATAACTTAAAGAC
TGCTTAAACTCAGGAGCAGTTATTTTTTCCCCACCCACCATACTA
GACCCCTTCCCCCAAAGAAGCTGGCCTGGGATTGGAAGGTAAACA
TGAAAGGTGCCAGTAAAATCCTAGCTTTCCATTCTCTTGATTTCC
CCAG

[0102] In some embodiments, the intronic domain that promotes trans-splicing primarily in the brain comprises or consists of sequences from the gene CADM3. In some embodiments, the sequences from gene CADM3 comprise or consist of:

(SEQ ID NO: 49)
TGAGACTCCCAAACCCCAGTGTCTCTACAGCATGCTTCCTTGCAA
ACAAACCTCCCTAGATGGGTCCCTGAAGCAGCTGGGAGCCAGGCA
AGTCTCCAAGCACTTTAGGAAAGTTCAGCCTGTGTTCCCCTGGCA
ATGGGATAAAATGTAAAAAGAAATGGGTTTTAATCCTTTGTGCTC
TACTTGCTGTTTGATCTAGGACAAGGTTCTTACTCTCTTTGAGTC
TGAATTTTCTCTTATAACAGAGAGATGATCATACCCCTTCTACTT
ACCTCCCAAGATGGTGTGAGGAAAACACAAGACATGCATGTGTTA
TAATTTCCAAAATAAGTACCCCAGTTGCTTACATGCTCTCATCTT
CATCCTATATTTCATCCTATATTTCAACTTCCTTCTTTGCGTCTC
TGAGACTCACACTATTTCTGTGGCCACCCAATTGTGCTGTAAGTG
GAGGGTCATATATCATGCCTGTGCTATGGCATTGCTCCTCACTGC
CATG

[0103] In some embodiments, the intronic domain that promotes trans-splicing primarily in the brain comprises or consists of sequences from the gene NDUFS2. In some embodiments, the sequences from gene NDUFS2 comprise or consist of:

(SEQ ID NO: 50)
GGTGCCCAGGGGTCTGGCTTCTCCAAACTCTCCTCCTGAGCCCTC
CTTTCCTGGATCTTTGTCTCTCCCTGCCTGTGTCTTCTGCAGCTT
CTCTGGCCTCTCCCTCTGTAGGACTCTGTCTGGGCCGCTTCTGTG
CCTGCCCTGTCTCTGCCTTCTTCCGCTGTGCCTTTGTCTCTGTCT
CTTTCCTCCTCTGTCTCTCTCGTGCATATGTGTCTGTGGGTCTCC
CTGTGGGTTCTCCCCAGCCTCTCTCCGCGCCAGCTCTTTTAAGCA
TGGTGAGCCTCTGCGATTGATTGGCTGATCTCTAAGCCACTCAGC
TGAGCTCTGTCGGTGGGACTCAGATGGGTGTATCATCGCTTCCCA
AAAAAATGGGACTTGCCCAGGGGAGGGGAATCTCTAGCAGCCGAA
TGGATAATAGGCACTGGGCCAGCTGATGACATAGCCTTTTCCCAA
ACCCCACAATCAGCCCTCAGCTGTCTCTTTCCCTTTTTGGTGGGA
CAGA

[0104] In some embodiments, the intronic domain that promotes trans-splicing primarily in the brain comprises or consists of sequences from the gene NDUFS2. In some embodiments, the sequences from gene NDUFS2 comprise or consist of:

(SEQ ID NO: 51)
TAAGGAGGCATCAAGAGGGAAGAACAAATAAAAGAGGTAGCTTGA
CATGGCTCAGGATAGAACTGAGCAGCTGGGAAGAGTAAAAAAGGC
AGAACATTGGGGGAGGCAAGGAGACAGTGATCAGGGAGTTGACTG
CCCAAAGGTAGGATGATCCTGCTTGGAATGAACATAACAGAGGCG
GCAGATGACAAGGCAGGAGGGGTTAACGACTTTTCCTTTTATAGA
AGGCGGATCCAGGGTGGCACCTCCTCTTTTCTAACGTCCCTTCTC
TCCCTCAGGATCCCCCTTCCTGAGTTACCACTACCCACCCCCTCC
AAAGCCCAGAACAGCCATTCCGCCTCCATTTCCCCCCAGGGTTCC
CCCTCCCCACTTCCTGACTCCCCATTTCCCTGGCCCAGCTCCCAG
TAGCTTCCCCCAGGCTTTTGGCCCTGCTCCTACCCACTCCCAACT
GCCCTAAACCCTCCCCCAGCCTCAAGTCAGCCAGCCCCCAGCATA
GGCA

[0105] In some embodiments, the intronic domain that promotes trans-splicing primarily in the brain comprises or consists of sequences from the gene DHX9. In some embodiments, the sequences from gene DHX9 comprise or consist of:

(SEQ ID NO: 52)
GATCAAAATGATATTTAGAGCATGGTTCCCCCTTCCTCCCACTGT
TTTGTTCAATCCTGAATTCTCAGATATTTCTGGTGTCAGCCTTTT
TAAAACCGTCAGGTTGCAAAGGAGTGATACATTTGTTGATGATTT
GTTTTCTTTCATATTTTGTCTTTCTGAACGCATTGGGCTTGGTAG
CACTTGGTGACTTTAAGAACAATGAGATACCGAAGTGTGCCTGAA
GCTCATCGTTGCAGACATTTTTTGTTATCAGTATCTTATCATAGA
TTTCTGATACAAAGCAGTGAAGAATTCAGGAAAAGACAATGTGGG
AGGCACAGACAGTTGGGGGAGCCAGGACAGCATTGCTCTTTGTAT
GTCCTTTTATTTAAAGGCATAACAGACAGCAACACCAGAGGTCTG
TGTTCATACACACATGTGCTGCTGCTTAGGCTGAACTAAGCAATC
ACATGGGAAACTATTGTAAACTGATTTCTGGTGTCGCTGTTCCCC
CTAG

[0106] In some embodiments, the intronic domain that promotes trans-splicing primarily in the brain comprises or consists of sequences from the gene DHX9. In some embodiments, the sequences from gene DHX9 comprise or consist of:

(SEQ ID NO: 53)
TCAGTTCACACGAGGTATAGGAAGGAGTCTAACATTTATTTTTTT
CTTAAGCCTCACCTAGCCTTTTATTCACACCACCAAGTCTAGGTT
AGAATGTATCTGAGCAGTGAAAGGACCAGAATGCATAGTTATCAA
AGGGCAGTTTTTCCCTTGCTAAAACCTAAATTCATTTTTTAGACT
CTGCTAGCAGTTTTAGATATAATGTTACAACATGTGTTTTGTTCT
CCAGGACCTGATTTAAATAAATGTGATAAAAATAGGCTAAGTTTT
TTGTCATCCAGGGCTGCTTCCAACTGCAGGCAGATGTGAGAACTC
TGCCTCAGGAGCCACTGATATGCACAAAGTGTATGTGCATGTGTG
AGTTTGCGTATATTAGCTTAATAGATCGCAGTCATTAATGGGTGG
CCTATGCAAAGGAATCTTAAAATAATTATAACCGTAATGTAAAAC
ATTTGGGGCCTACTTTATTTCTTGGCTCCAAGCTAAGTGGAAAAT
TCCT

[0107] In some embodiments, the intronic domain that promotes trans-splicing primarily in the brain comprises or consists of sequences from the gene TMEM9. In some embodiments, the sequences from gene TMEM9 comprise or consist of:

(SEQ ID NO: 54)
GTGAGGTCTGATTATTTGCCCTGTTTAAACAGGCGTGAACGCGGT
GCCCCAATCAGGTGGGACATTGGTCCAGTGGAACTTGGCTATTGG
CTGAGCGGGGCACCCAGCTTGAAAGTCCTGAGGTTCTTTTTTTCA
CTCTTCTTCACAGTCTAGGTAGGGCAGGGCTGAGATCAGAAGCCG
GCAATGGCCAGGCATTGTGGAATTAGGAAAAGCATTTGAGAGGGA
GTCAGCAAGTCTGGGTTTGAGTCACACCTCCACCATCTGGTAGCC
TTGGGATCACAGGTGATCTAGCCCAGCAGTTCTCAATCAGATGAT
TACAGCCCCCCCAGGGGGCATTTAGAGGTGGGTGAAGGTGCTTTT
GTGGTCCCAATAACAGGTGTATTACCAACACTGTTACAGGGACCA
TGGATGCTAAATGTCCCACCCAAAATCCCAGAGCACCCACATTGA
GAAACATTGAATTTGCCTCATTAAATCTGTCTTTTCTGTAAAAAC
AAAA

[0108] In some embodiments, the intronic domain that promotes trans-splicing primarily in the brain comprises or consists of sequences from the gene TMEM9. In some embodiments, the sequences from gene TMEM9 comprise or consist of:

(SEQ ID NO: 55)
TGCACATCACCACACCCAGCTAATTTTTTAAATTTTTGGTAGAGA
CAGGGTCTCACTGTCTTGCCCAGGCTTGTCTCGAACTCCTGGCCT
CAAGCACTGCTCCAGCCTTGGCTTCCCGAAGTGCTGGGATTATAG
GTGTGAGCTCCATGCCTGGCCTAATGTAGCCCTTTCTGTTCCAGT
TTGTAGCATTTTTCTGCTTGTCCTTTGAAGAGTCTATAAATAGCA
TTGGAAAATAATTCTCATATTTAAAGGCACTGCTGGGTCCTCCAT
CAGGTTTCTCCTTTCGAGGCACATTTAGGGGGCGGTGGTCTTCAC
TGCTGTCCTTCCTGCCTATTCCAGGGAGCCCTGTGCTGTAGCTCC
TCTGTGTTCTCACCACTCAGGGAAAAAGCAGCTGTCTGTCCTTCA
CTCCCAGCCAGTGCCCTGTGCAGACCCAACTCCTTTCATCCACCT
GAGGCAGCCCCTCCTGCAACTGTCATTCTCCTTCTCTGAACTTGC
TCCA

[0109] In some embodiments, the intronic domain that promotes trans-splicing primarily in the brain comprises or consists of sequences from the gene GUK1. In some embodiments, the sequences from gene GUK1 comprise or consist of:

(SEQ ID NO: 56)
TAAGTACTTCCCTAAGGGGCGGGGAAGAACGAGTGAGACATGGGC
GGGGCAGTCGCCTCATGACGTCAGTCTCGCGCGCGGGCGGAGGTG
GGCCGGTGCGGCGCTGTCACGTAGGTTCAGTGGGCGGAAGAGGTG
GCCCCGGATGCTGCGGCGCCCGCTGGCCGGGCTGGCTGCGGCCGC
CCTGGGCCGGGCCCCACCGGACGGTGAGTACGACAAGCGCGATCG
CGAGGGTGACTCGGGTCGAGGCGGCAGCGGTCCCTGCGCTTTGCG
GTCGCCCAGTCCACGCCGCCTCCGGATCTCCTCCTAGCCGAGACG
CCCTGTGCCGCATTCAACTGTGGGCCCTGAGAACGGGGGAGCTCT
GGAGGGCGGACGGGCTGGCAACGCAGCGGAGCCCGGGTCCCGGAG
GGCGGGGCGCTCCTCAGGAGCTGGGCAGGCCGGCAGTTATCGCAG
TGTCGAGCTGCTCCCCGGGCGTATAGGAGCGCTCGGTGTCTTCCC
GACA

[0110] In some embodiments, the intronic domain that promotes trans-splicing primarily in the brain comprises or consists of sequences from the gene PDIA6. In some embodiments, the sequences from gene PDIA6 comprise or consist of:

(SEQ ID NO: 57)
GTAAGTAGAGGAAACTCCCAGAGTAGGAGCCTCCATCTGTTCACA
ACAGCCAAAAGGTGAAAACAACCCAAGTGTCCACTAACAGACGGA
TGGATAAACAAAATGAGGTCTAGTCATATGATGGAATGTGACTCT
GCTTTAAGAAGGAAGGAAATTGACACATGCCACAGCATGAATGGA
CCTTGAAGACGTTAGGCTAAGTAAAATCAATCACTCACAAAAGGA
CAGTACTATAGGATTCTACTTACATGAGATGTCTAGAGTAGTTAA
ATTTATAAAGACAGAAAGTAGGATGACAGTTGCCAGGGGTCAGGG
GGAGGGGGAATGAGGATTTGGCATTTAATGGGGATAGAGTTTCAG
TTTGGGGTGATAAAAAGCTCTGGAGATGAAGGTTGTACAACGATG
TGAGCGCATTTAATGCCATGGAACTGTACACTTAAAAATGGTTAA
AGGCCAGGTATGGTGGCTCACGCCTATAATCCCAGCACTTTGGGA
GGCT

[0111] In some embodiments, the intronic domain that promotes trans-splicing primarily in the brain comprises or consists of sequences from the gene PDIA6. In some embodiments, the sequences from gene PDIA6 comprise or consist of:

(SEQ ID NO: 58)
CTAACCAAGCAAGCCAACAGGATTACCATAGGGTGTTGGAGAAGG
GAAAGTTGTAGGTAAGATTTAAATAAAGCAGTGTTTAATAGGCTC
AAAGCAAAACACAACTGTGTATAAAGGAATTACGGTCAGACCTGG
GCTACGAAGTGGATGGAGGTTCCTCTTTCCTTGGAAATGATGAAG
TTAAGACAAATGTGCAATGTTGTGTCCAGAAGGCCCTGGGTTGGA
AATCAAGGCAGCTTCTCAGTGTTAAGATGACCCAGGTCCTTCAGA
CAAAAGAAGGATGTTCCATTCTTACTCTATTTATCTCAAATAGCA
CAGTTTATAACAGTCTGTGCTTTTTCAGGAATAAGATTTTTCAGC
ACTATAACTTTTCGTTGATTAACAAAAGCAGTTTTAGCAGGTTCA
CAGATGTAAATACGTGGAGCCTGGCATATGGTGAACATTCGGTAA
TAGTTTCCCCATCCCCACCTCACTCATCTCCTCTTCTCTCTCACT
TTCA

[0112] In some embodiments, the intronic domain that promotes trans-splicing primarily in the brain comprises or consists of sequences from the gene SNX17. In some embodiments, the sequences from gene SNX17 comprise or consist of:

(SEQ ID NO: 59)
TCTCAAACTCCTGACCTCAGGTGATCCACCCACCTTGCCTCCCAA
AATGCTGAGATTACAGGCATGAGGCCTGTAGAAACTGATTTCTTT
GGGCCTCAGTTTCTACAACTGAAAGATGGATTCTTTGATCTGCAA
AGTCCCTTTAAGTCCTAAGATATTTTGTGAACAGACTTAGCTATT
AACTGTGCACTTTATAAAGCCCTTTCCTTCCTTTAAGGGTTCAGT
GAACAGTCTTGCTAGGTGGTCAAGGGGCTCCCTATAGGTCCTGGC
CCAGTACAAATCCTCCCCGTACTGTGGAGGGGCTGACTTGTACAC
AGTAAAATAGAGCACAACTTATATCTAGGACAGCTCCCTTGAGGT
GCTACCGCTGTCAAAGGAATTGTTTCTCAGATGACCAGGGTAGAC
AGGGGAACAGGGACTGAGGGAAGGGAGGGGCACCCAAGAGAACAT
TATGAGCATATGTAGATTGCCTCATCTCATTTTCTGTGTTTATGT
GAAG

[0113] In some embodiments, the intronic domain that promotes trans-splicing primarily in the brain comprises or consists of sequences from the gene SNX17. In some embodiments, the sequences from gene SNX17 comprise or consist of:

(SEQ ID NO: 60)
TTCGGAAGGAGTATGGGGCCAATGTGCTTCCTGCATTCCCCCCAA
AGAAGCTTTTCTCTCTGACTCCTGCTGAGGTAGAACAGAGGAGAG
AGCAGTTAGAGAAGTACATGCAAGCTGGTGAGTGGTTGCAGGAAA
CTAGGTTGACTATATTGAGGACTATGGGGAGAGACTTAAAAACAG
CTGGTTCTGTGGAAGGGCCTGATTTAATTTCTAGATCTAGGAAGG
CTCTTGTTTGATCTGTTATGCAGTTAGCAAAGTAAATAGTGTACG
AGGATGTGTAACTCTGTGTACTAGCAAAACAATTTGGGCACTAAC
ATCTATGAGAAATACTAGTATAACACTAGTCTTAATATCAGTGGA
GAGAACTTAATTTGTATCTGATGTGCTTTAGATTAACATCATTGT
TATTTCCCTAGTTCTATAGACTGGACTCACCTAGATGGCAGCCAA
GGGTGGGGCAGGTGAAGAATTTATGCAAACAGTGAGTGAGGTGAG
GCCA

[0114] In some embodiments, the intronic domain that promotes trans-splicing primarily in the brain comprises or consists of sequences from the gene DCTN1. In some embodiments, the sequences from gene DCTN1 comprise or consist of:

(SEQ ID NO: 61)
GTAGAGACCCACTCTGGCCGGGGGTTACCAGGCTGGTGGGAGTTG
GAGCTAAGGGAGCAGGGTGGAGGGGGAAGCCAGGACTGGAGATGG
GTGATGGGGGGATGAGGAAAGGGGAAGAGTAGGAATGGAGCCCAA
TTTTCAACCCTTTCCACTTGGGGCTGATGAGATTTTTTATGGTCC
CCACAGGAGCCATCCCTGGGCAGGCTCCAGGGTCTGTGCCAGGCC
CAGGGCTGGTGAAGGACTCACCACTGCTGCTTCAGCAGATCTCTG
CCATGAGGCTGCACATCTCCCAGCTCCAGCATGAGAACAGCATCC
TCAAGGTGAGGGAGCCACGGGGAGGACTGGGATGGGAGATGGAGC
ATATTTGCCCCATTGATGATAGATGACAGGGGCCTCCTAGCACCT
CTTACCACTATCCTTCTTTTTTCATCCACAGGGAGCCCAGATGAA
GGCATCCTTGGCATCCCTGCCCCCTCTGCATGTTGCAAAGCTATC
CCAT

[0115] In some embodiments, the intronic domain that promotes trans-splicing primarily in the brain comprises or consists of sequences from the gene DCTN1. In some embodiments, the sequences from gene DCTN1 comprise or consist of:

(SEQ ID NO: 62)
AACATAGTTCTGAATTTATGAAACTTCCCACCAAAAAAGAAGGTC
TTTTGCCTCAGAGCAATGGGGAATCCTTAGGAGCAAGGGAGTGTG
TTTGCATCCCCAACTTAAGCTTTGCTGCTGGTGAGCACTAAGGGT
GCAGACATATTGGGGTCTCTGGAGCATTCTCCGTGCCCTTCTTGG
AGATGGCATCTGAGACAGGGAGGCAGGAACAGCCTCATGTTCCAA
GTACTTTGTACAGTGCACACTCTCTTTGCCACTGTTCTTCACACA
TTGTACCCTGTCTTGTGGCCTCACTCCTGTTTGGTGTCTTTCTTT
AACACTTATCTGCTCGTCCCCAAAGATAGGTGGCAGAGAGTCTTG
TTAGAGAAAGTATGATGATTAGGAAAAGGGTTTTCCTGCAGGTTG
TGTCCAGGATTCCTCTGGTGTGTCCCCGTAACCCCCAAATCACCT
AACTCCTCTCTCCTCTTTTCCTGCTCCCCCATGGGCTATCCCGAG
CACA

[0116] In some embodiments, the intronic domain that promotes trans-splicing primarily in the brain comprises or consists of sequences from the gene WDR54. In some embodiments, the sequences from gene WDR54 comprise or consist of:

(SEQ ID NO: 63)
GCTCGCCCCGCCCACAGTTGCCCCGGCAACCGCGCCGCCCGCGGC
ACGTTCCGGCCGCTCACCCCGCCCAAGGGCCGTGCGTACGTGCGT
CGTCTCTATGGTGGCGGCGGATTTGGAGGGACCCTACGAACCAGG
AGTCAGGCGAGCCGATCTGGGGCTGCAGGTGTTACCTCTGATCTA
GGCCGGGGGCTTCAGGGATCCGAGCCGAGGGAGAAAGCCTTGGGG
GCTTCATCACACTTATTTGGCTCGCGGGCTTGGGGCCATCGGGTG
GTCCTGTGTCATCCCCATTCCTCCTCTGCGATTCCCCCGTCGCCC
CAAAACAGCCCTGGGACTCCCCTGTCTTGCTCCTCGAGACCCTCC
CCCATCACCGTCCTCTGGGCACCCCATCCTATGACCCAGTCTCAG
GCATCTTCCGAAATGCTCGATGATAGCCGCCCTCGGGCATCTCCG
CTGCGTCTGTTTGTAGCGCGCCTGGTGATTCGGCTGCACCCCCAC
ACAG

[0117] In some embodiments, the intronic domain that promotes trans-splicing primarily in the brain comprises or consists of sequences from the gene WDR54. In some embodiments, the sequences from gene WDR54 comprise or consist of:

(SEQ ID NO: 64)
TGAGGCATGGAGCTGGGAGTGATGTTGCTGAACCCAGTCCTACCC
CCAGCCTTTTCTCTCCAAACCTTCAGGAGCAGGCATGTCCTAACC
TCAGAATCTCCCCAGGCATGTCCTAACCTCAGAATCTCCCCTCTC
CTGCCGGGCGCGGTGGCTCACGCCTGTAATCCCAACACTTTGGGA
GGCTGAGACGGGCACTTGAGGCCAGGAGTTCGAGACCAGCCTGGC
CAACATGGTGAAACCTCTTCTCTACTAAGAATACAAAAAAAATTA
ACCGGGTGTGGTGGCGTGCACCTGTAATCCCAGCTACTTGGGTGG
CTGAGGCAGGAGAATCGCTTGAACCCAGGAGGCTGAGGTTGCAGT
GAGCCGAGATGGCGCCACTGCACTCCAGCCTGGGCCACAGAGCAA
GACTCCGTCCCCCAAAAAAAAAAAAAAAACAAACAAACTCATCTT
CCCTGCTTTGATTTTCTCCCTACACTGATGCACCTCCCTCCAGGT
CCAC

[0118] In some embodiments, the intronic domain that promotes trans-splicing primarily in the brain comprises or consists of sequences from the gene CAPG. In some embodiments, the sequences from gene CAPG comprise or consist of:

(SEQ ID NO: 65)
GTAGGAGGAAGAAAGGAAAGTAGGAGTGTTGAAAGGTGAAGGTGG
CAGGGTGGCTGCCAGCGCGGCTGGCTGGTACCCTCCTGGGTGGGC
AGGCGAGGGCTGGCTGTGGTGGCCTGGGAACAGAGACCCACATTT
CTGGATACCACATTGTGCCAGGGTGGAGTTCCCCCAGCCTGCTGT
CCTGCCAGCCTTATGCCAGGCTCCAGGCACCTGATCTGATGGCAG
CTGTGAAGCTGCCCGGGAGGATGGGTGGGCTGTGCCCATGCTGCA
CATGGAGGAACTCTTGGGTCAGGGCTTGTCCCAGCTGTGCCAGAC
CTCCTGACGGAGGCCACCACACTGCTCCTGAAGGCCCTCAGCCAG
ACTGGAGGTGAAATCAGATTAGAAGCTGCCTGTCCCCAAGACAGG
ACTGTGGTGTGATGCTATTTGGGTGGGAGTGGCTTGGGGAGGGGG
CAGGGCAGTCCTAGCCATTTGAATTCAAATGCAAGTGGCACATTT
GATT

[0119] In some embodiments, the intronic domain that promotes trans-splicing primarily in the brain comprises or consists of sequences from the gene CAPG. In some embodiments, the sequences from gene CAPG comprise or consist of:

(SEQ ID NO: 66)
AGAATGTTTTATGGCCTCAGCCATTCCCTGAGAACTGAGCTTAGC
CAGGTGCAGTAGCCCACGCCTGTAATCCCAGCACTTTGGGAGGCC
AAAGTGGGAGGATTGCTTCAGTTCAGGAGTTCTAGACCAGCCTGA
GTAGCAAGACTCTGTCTCCAGAAAAAATAAAAAAATTAGTCGGGC
ATGTTGGTGCAGGCCTGTGGTGTCAGCTGCTCAGGAGGCTGAGGC
AGGAGGATCGCTTGAGCCCAGGAGTTCAAGGCTGCGGTTAGCGGT
GATAATGCCACGGCACTCCAGCTTGCGTGACAGTGAACCCTGTCT
CAGGAAAAAAAAAAAAACAAAAAAAACCAAAAAACTGATCTTAAA
AAAAATCAAATACTTGCATTCAGGGCAAGGAGAAAGACAAACTGA
GGGAGGAGGAAAAAGTAATGTGAAGCCAGTGACCCTGCCCAGAAA
ATGTGACTAACCCAGCAGCGGTGGGGGCTGTGCCGCGCCTGCCCC
AGGC

[0120] In some embodiments, the intronic domain that promotes trans-splicing primarily in the brain comprises or consists of sequences from the gene DBI. In some embodiments, the sequences from gene DBI comprise or consist of:

(SEQ ID NO: 67)
CAGCAAAACTAAGCACCCTACTTCCGTTGTCCCCACCTGTTCCCG
GCGTCCCCTTCGGCTACTCCCGGCGTTTGCGCAAGCGGTCCCACG
TGGGCTCGGGCGGGGCTAGCGCCGCGGCGGGGGCTGGGCACGCCC
CTAGCGCATAGCTGGCTTCTGATTGGCTTTCCGGTGCTCGCCCGA
GCAGGGTTGGGGCGAGTGGACCGCGCCTCTAAAGGCGCTTGCCAG
TGCAATCTGGGCGATCGCTTCCTGGTCCTCGCCTCCTCCGCTGTC
TCCCTGGAGTTCTTGCAAGTCGGCCAGGATGTCTCAGGTACAGCG
CGTGCACAGCCAGGCTGCGAAGGTGCAGCGGGCGGGAGGCCCGTT
GGGGGCTCAGCCGGCTGCCAGAAGCTCTCGGGCTCTTTCCTTCCG
TGCCCCTCACTTGCTCATGGGCCCATGCCTAGCCCTGATTCGTTG
GACAGAGCCTTGTGAGCGGGATTTTCCGTTTGGGGATTTCTAAAT
CTGC

[0121] In some embodiments, the intronic domain that promotes trans-splicing primarily in the brain comprises or consists of sequences from the gene DBI. In some embodiments, the sequences from gene DBI comprise or consist of:

(SEQ ID NO: 68)
ACAGGGCAGGACGTCGCGGCGGAGTGGGGAAGCGAGGAGTCCGTG
GCCGAGAGCTTGGAGGTCAGGGGAAGTACGGGGCCGGCTGCTCAG
AGTGCGGGACGAGGAGAATCGCGGCCCGGGGAGAGGTGACCCAGG
GGCCCCTCCCTTCTCTCCAGTGTAGACCCTTGTCTGAGACCGAGC
TATGTGGGGCGACCTCTGGCTCCTCCCGCCTGCCTCTGCCAATCC
GGGCACTGGGACAGAGGTCGGTGTTGAACGCGCGGGCCCCAGGGG
GAGGGAGGGGACCAACGGGCTCCGGCGCTGACACCGCGGCACTCA
TGCCCTGTCCCCTTTCAGCTGTTTCCAGCATACTGTGCCCCGTCT
GTCCTCAGGCCAGGGCTTCGCTGCAGCCCCGGCCACTCCCTAGTG
CCTGGCCCGGTGGTGGCCAGGCAGTTGGCCGCGCTGCTTCTCCCG
CAGAGGGGACCCCCACTGGGGGCGAAGGCTTGGCCTGCCCTCTTC
ACTG

[0122] In some embodiments, the intronic domain that promotes trans-splicing primarily in the brain comprises or consists of sequences from the gene BIN1. In some embodiments, the sequences from gene BIN1 comprise or consist of:

(SEQ ID NO: 69)
GTAAGTGCCCACCTCCAGCCCCTGTCTGGCTTGTCCCCAGTCTCT
AGGGGTGCAGCATGGAAGGAGAGCCCCGAGGAGGGGTTGCAGGAG
GGACCAGGCCACCATGGATGTGAGGGTGAGGACAGGGTCCTGAGC
TAGGCTGCCCCAGCACGGGCTTGTCACCAAGGCTGCCAGGGATGA
GTGAGCGCAGCTGGGCGCATCAGCCCCTCCTGCTTGCCCACCCCA
GCCCAGCCTCCCAGCGCAGGAGGAGCATTTAGAGCACCTACTGGT
TTATGCCAGGCACTTTCCAGAATCTTCTCATTTAATCTTCGTCAT
CACCTTTACAGCCAGACACTTCCTCCTTTTACAGATGAGGAGATG
GGGGCTAGGAGGGTTGAGTAACTTGGTTCCAGCACTCAGAAGTGG
CCAAGTCTGAGTGTCGGCCCAGGTCAGCCCAGCTCTGGGGTTCCT
GCAGGGCCTGCCGTGGTGCCCGTGCTGCGGTGCCCGTGCTGCGGT
GCCC

[0123] In some embodiments, the intronic domain that promotes trans-splicing primarily in the brain comprises or consists of sequences from the gene BIN1. In some embodiments, the sequences from gene BIN1 comprise or consist of:

(SEQ ID NO: 70)
AGAGGCTCAGGGAAGGCTCAGTACTTGCCCAAGAACTGGTCATGG
TAGAGCCAGAATTCCAACAGGGTCTCCTGGGCTCTGTCCCTGAGA
CCCCCTGATACAGGCAGAGATGCTGGGAGGGGCAGGCGGGTGTGC
AGGCGCCCTTGGGGCATGCGCTGGCAGCCCAGGCTCCTGGGAGCT
CTGGAGGCTCCACCGCAGGATTTCCCTCTGGAGGAAGCCAGAAAG
AGCCAGCCTGGTGCGAGCTGGTAGGGCCATTTTGACAAGTGGATT
TCGGTAGGTGCTGAGCTTGGGCAGCACAGTCACACCTGCCTGTCC
CTTTGACAGTGGTAGGAGAGAGGATGTGGGAGGCGGGTGGCTGGC
CGGGCTCCGCTGGTACCCACCCTGCCCCCACCAACCCCAGCCGCT
GGTGACATTTTCTCTTGTCTTGTGATCCTGCCCATTGCCTTTCCA
CCCCGGCCTCCCCGCCCCCTCCCTGTTCTCTCCTCGTGGCCTGTT
ACCA

[0124] In some embodiments, the intronic domain that promotes trans-splicing primarily in the brain comprises or consists of sequences from the gene KIF5C. In some embodiments, the sequences from gene KIF5C comprise or consist of:

(SEQ ID NO: 71)
ACTGCTTTCTTTTCTCTCTGGTAGGTCAGCAAAACTGGTGCCGAG
GGAGCTGTTCTTGACGAAGCTAAAAATATCAATAAGTCTTTGTCT
GCTCTTGGAAATGTGATCTCTGCTTTGGCAGAAGGGACAGTAAGT
GATCCTGCCCCCATCTATTAAGTAATATTATGAGAAACCACCTTT
TGGGGCCTCATAGTCCCTTTGCCACACACCCCAAAGGCTGGTTTG
TTTTTCTGTTTGGAAGAGGACAGAGGGAATCCTGGCTATGGATGC
CTGCTTGCTGGGAGTTCCCATCTACTAAAAAGTATGAATGGTGAT
GCTAATTTCCTATGACATAGGTCAAAGAATGGGCATTCTAAACTT
TGGCAAGATCCAAAGACCCAGCCACAAATTCTTGTTTTACTCGGT
TTCTAAGCTCAGTGTCTTCATCCCTGACTTGCTTGCCTCTGTGTT
TTTCTCAGAATGGGCTGTCAAAACCAATACTTTTTCTTTTCCTAA
ATAG

[0125] In some embodiments, the intronic domain that promotes trans-splicing primarily in the brain comprises or consists of sequences from the gene KIF5C. In some embodiments, the sequences from gene KIF5C comprise or consist of:

(SEQ ID NO: 72)
TACGTGTGGTCTCTCAGGACCCATCCTCTGTGCTAGGTCTTGGGT
CTTAAGAGTGAATGGCAAGGCTGGGTGCAATGGCTCACACCTGTA
ATCCCAGCACTTTGGGAGGCCAAGGCGGGTGGATTGCCTGAGGTC
AGGAGTTTGAGACCAGCCTGGCCCACATGGTGAAACCCTGTCTCT
ACTAAAAATACAAAAATTAGCCGGCCGTGGTGGCATGCGCCTGTG
GTCCCAGCTACTTGGGAGGCTGAGTCAGGAGAATTGCTTGAACTC
AGGAGGTGGAGGTTGCAGTGAGCCAAGATCATACCACTGCACTCC
AGCCTGGGCGACAGAGCGAGACTGTCTCAGGGACAAACAGCCTTT
TACTAAATTACATCTAGCAGGTGATATGTAAACTTGAGGCATCAC
TTATTGAAGCCAAAGCAATAATTATATTTTAAAAT

[0126] In some embodiments, the intronic domain that promotes trans-splicing primarily in the brain comprises or consists of sequences from the gene DYNC1I2. In some embodiments, the sequences from gene DYNC1I2 comprise or consist of:

(SEQ ID NO: 73)
AGCCCACTGTTTTTACTGCAGCGTGTATAAACATTTAGACATAAT
TTTAAGGTTCAATGAATGTGACTATCCTAAAAAACACAGACTTTT
AATTAAATACTTATTTCTTTAGTTCCTATATAACTAGGAACTTGC
CTTCTTTTCAGTAGACTGTTAAAAGAAGGGCTTTCAGCTCAACAT
AAACTGTATTAGTCACTTAATATCATACACTGAAAAATTATTTTG
AAAAGATACTTGGGATTGGGGACATTTATGATAAAATTTAACCAG
AAGATGGCAGTGATGATCCTCCTATACTCCCTGCAACGGTAATCA
AAAAGTTTTACAAATGTCATAGCATGAAATGTGCACGTTCAGCTG
TTGTTATATAATGTTAAAAGTTGAGGATCTAGGGGAAAGCACTTG
CTGTTTATTTTATATACTATGAAAAATGTGTATTTTTCTATAAGA
AGGGATTAAGAATATTTTGGGTGTCTGTATCTTTGTCTGTACACT
TCAG

[0127] In some embodiments, the intronic domain that promotes trans-splicing primarily in the brain comprises or consists of sequences from the gene DYNC1I2. In some embodiments, the sequences from gene DYNC1I2 comprise or consist of:

(SEQ ID NO: 74)
TAAGGAAGTTCCCATAAGTCTTGCCTTGTTTATTTGCATGCATCA
CTTTATGTTATGCATAATGTCTAGAAGGCATGCTGTTTTATTGCC
TGTTTGCATTTTTCACCCAAATTGCTGGAAACTAATGAACATTTT
AAAGGAGCCATTCCTTTAGCTGCAGTCATTTCTCTAAATTGATAT
CTTTTTTTGGGGGGGAGGCAGTGAAATCATTTTAAACATTACTTT
TTGAAAGAAAAAATTATTAGACAAAAGTTAATATTTTAAAATAAA
TCTTGAGAAACTAGAGATTAAATAACTTAATGAAACATATTTCAG
AGTTGAATTTTGGCAGCAATTGTAAATAATATTTATAATCTGGTG
ATATTAAAAGTGAAAAGTTACAAGGGGGAGAAGGAATGCTCTCCT
TTGAAAATTAGTGGCCACATTTGGTGATGGATGAGATGAAGATGC
ATCCTTCCATAATCTTGCCTTTTTAAAAAAATTATAAAGCTCAAA
TGCA

[0128] In some embodiments, the intronic domain that promotes trans-splicing primarily in the brain comprises or consists of sequences from the gene FN1. In some embodiments, the sequences from gene FN1 comprise or consist of:

(SEQ ID NO: 75)
GGGGATTTTGGTTTTGGTTTTGGGTTTTGTTTTTTTGCGGTGGGG
GGGCTGGTATTTGGAAGAATTTAGCTCTTTATGTTACAGAAATCT
TTTTTGCAAGGACTTAGAAATGATAATGCTTAAGATTGTTCTTGC
CCAATGTGGGAAGAGAATCTAAGGTTTTTATATGTCTTGCAACCT
CATCAAAGGAAAATTACTGGCATCATTTTCATAATTTGAAAAAAA
AAGCCAAATTAATATATTTCTTTTTTGATTCACTTTTTAAGTGAT
CATTTTTAAAACTTTACTTTTGACCCACTGAATTTATTTAGATAG
AAGGAAAAGAGATGATGGGAGGGAAGTTTAGATAAAGGATGGAAG
TTGGTTTTATTTAAACAATAGCCCTGTGATTTCCTAATGAGAAGT
GACTAGAAATTGAAGAAACCAAATAAGGAGGATATTGGTCAATTT
AGCTTTAGTTTCTCTTACTCTCTCAAGCCTGCCCTGTTTAACTCC
AAAG

[0129] In some embodiments, the intronic domain that promotes trans-splicing primarily in the brain comprises or consists of sequences from the gene FN1. In some embodiments, the sequences from gene FN1 comprise or consist of:

(SEQ ID NO: 76)
ATACAATAAGTAAATGAAGTCTGTGTTCTGTATTACATTATTTTT
GTAGGATCGTTTCACAATTTTCTCACAATTCTTACTTTGATAGTA
GAGAAAATAAAAGCAAGCCAAGAGACTTTTTTTTAAAAATATATT
TTATTTGCTATAAACAACTATGATTTGCATTTCTCATGTGAAGAA
TAATAATTATCGGCTAAAAATGGATTTGCTGCATTGATTTTCAAC
GTAAATATTTAAAAGATTAATGCCAGATAATTTTATTATACTCAC
ATTTAACGACAAGCAAAGCTGTTTATAATGATGACTGTCCATGTA
CACAGTTTTAAGTTGAAGTGAGTGAATATTCAAGATAATTAAATG
CTACATTTTCATTTTCAGGCTCAAGTGGTCCTGTCGAAGTATTTA
TCACTGAGACTCCGAGTCAGCCCAACTCCCACCCCATCCAGTGGA
ATGCACCACAGCCATCTCACATTTCCAAGTACATTCTCAGGTGGA
GACC

[0130] In some embodiments, the intronic domain that promotes trans-splicing primarily in the brain comprises or consists of sequences from the gene SERPINE2. In some embodiments, the sequences from gene SERPINE2 comprise or consist of:

(SEQ ID NO: 77)
GTGAGTGGCCGCAGTATGTCATTTGATTGCATAGTTTGTGAATGA
AGCATGAGTTAGACTCCAGGGTTCAAAGTGGTGTCTGCAAGTCCA
ATTCAATGGCCTGTGGGTTGAGAAACTCCTGGACCAAGGAAGCTC
TATTCAGTCTCCCTCCTTCCCCTTCAATCTGCCATTGCTCACTGT
GCTCCTGGGAGGTGTTTCTCCTGTAGTTTGGGCAACAGAACAGAA
TCCAGCCCCTCCACTGTCTCCTCTCCTTGCCATATCTGGTCTCCA
GCATCCTTGCCCACAGGCTCTTGTTGATTTTGAAGGTTTTCTTGC
TCATTCCTTCCTGCTTTTGCATCTGCCTCTCCCTTTACCTGGAAT
GTCCTCCTCATCCTTCCAGGTTGATTGATCTCTTTGCCTTCCATG
CCTCTTGCTTCTGCCATTGCCAAAGACATAGGTACCCTGTTGTCC
GTTATGATTGGCACATGATTACAACTTTTACACCCCCCCGATTAC
AGCC

[0131] In some embodiments, the intronic domain that promotes trans-splicing primarily in the brain comprises or consists of sequences from the gene SERPINE2. In some embodiments, the sequences from gene SERPINE2 comprise or consist of:

(SEQ ID NO: 78)
GCTTCAGTGGTTAGACTTTAACCCCACTCCCTCCTTTTCTTAAGAA
ATAGGCCCCTGAGAGAACAGAAGACTTAGTTTCTTGCTACTCATA
GCTATCCTGTTTATACTGTTCTGTTATTTTTATTTTTGAGACAGG
GTCTTGCTTAGTCACCCAGGCTGTATGCAGGGGCCCGATCATGGC
TTACTGCAGCCTCGACTTCCCAGGCTCCAGCGATCCTCCCACCTC
AGCCTCCTCAAGTAGTTGGTATCACAGGCGTGCCACCACACCCAG
TTAATTTTGTATTTTTGGTAGAGACAGGGTTTTGTCATATTACCC
AGGTTGTTCTTAAACTCCTGAGCTCAAGCAATCCACCCACCTCAG
CCTCTCAAATTGCTGGGATTACAGGTGTGAGCCACTGCACCTGGC
CTATACTGTTCTTACTTGCTGCAACATAAAAGATTTTAAAAACTT
TTCTAGATTCTTATGGAAGTATTGCTGTATCTTCTGATTTCTCTT
TTA

[0132] In some embodiments, the intronic domain that promotes trans-splicing primarily in the brain comprises or consists of sequences from the gene PPP1R7. In some embodiments, the sequences from gene PPP1R7 comprise or consist of:

(SEQ ID NO: 79)
GCCGGCTGCGGTGAAGAGAGCGCAGGGTCCCGAGGCGACCCGAGG
CGCGGGGCCTCGGCGCCCACCGGGCAGGCTACACTGAAGGGCACC
CCGAAGACGCTGGGGGCGCGGGGCCCAGGGCCAACGGCCGCAACC
CCGCCGCGATTTGGGCACGGAGAGGACGCGGGCTCGGCGGTGCGC
GAAGGGCGACGGGCGCAGGGGCGGGAGACCCGGGGTCGGGCTGGT
CTAAGAGTCGGGCGGCGGATCCTCCTGGGCCAGGGGCGCGGAGCC
GCGCAGGCCCCACAGCCGCCCTGGGGAGATGGCGGAGCCCGGCCC
GCTCTCCCGAGCGCAGGTATCTCACCTGGATCAGGCGAGGGTCAC
GCCAAGCCGGCTACACACCACGGAAAGGAGCCCTTCCGCGCTTTT
ATCCCACCGACCAATCGCACAGCGACTAGCACCGATTGACAAGCT
CCACGGACCAGCCACTTGCGCGTATGGGCGGGACTAAGCTAGCCA
GAGT

[0133] In some embodiments, the intronic domain that promotes trans-splicing primarily in the brain comprises or consists of sequences from the gene PPP1R7. In some embodiments, the sequences from gene PPP1R7 comprise or consist of:

(SEQ ID NO: 80)
GCCCCCGGGCCGGGCAGATGCGGTTTCCTCCCGACTCGCGATCAA
AATGGGTGAGTAGCGCAGAGCTCGCCTCTTGGAGGCCTCTTTCTG
AAGGCGGAGGACGCGGGGCGGCTCGTTCATGGGCCGGGTGGCTCC
GCAGGGTAGACGAAGGCTGCAGCGTCCGCACTGGGCTGGGAACGA
CTTGCAAGGGGAGCCCAGCTGGCGCCCCGGAGCCAGCCAGCTGGC
TAGCGGCCCCACCAGCGCAAGTGCCCCGCACCTGCCCGCCTGCTC
CGAGCGTCAAGAGAAGGCGGCATTTCGCATGGGTAAAATCCGCGC
GGGGACGCCGGGAGAATGTTGTTGCTCTTGCCGTTCGGCCCATTG
TACAGACGCAGCCAGCGAGGCTCGCAGAGGTCAGGGATGCACGTA
GGACTGGCCCGCACCTTGCAGCCACGGAAAGATCCGCCTGGCCCG
CGGCCCCTCCACGCCTCCGAGGTCGAGACAGTGACATAAGTCAAC
TCTC

[0134] In some embodiments, the intronic domain that promotes trans-splicing primarily in the brain comprises or consists of sequences from the gene STK25. In some embodiments, the sequences from gene STK25 comprise or consist of:

(SEQ ID NO: 81)
GTAAGGAAACTGAGGCAGGAGAGGCGAAGCAACTCGCCCAAGGAA
TGGGCTGTGCCGGTAGCTTCTCCAAGGCCTGGTGCGCCCTGGCCT
GTGCGCGTGATCCCGGGCGGGGTCTCAGTACGAACAGGGGCTTCG
CGATGTGGCCAGCGCGGGCTTATCTCCGTGCCGTGACGACAAGGC
TAGAAGCCTGGGCGGCCGCGGTGGATCCTCGTGGCGAGGCGGGGA
GGGCGCCGGGCCTCACTGGCCCGCTCGAACCAGGGCTGCGCAGGG
CAGAGCCCAAGGGAGAGGGCCGCGCGGCCGCCGTAACGTCGGAGA
CGACGCCTGGCAGGCGCCAGCAAACGCAGAAGACCCGCGAGGGCG
AGGCAGGGAGGGCGCGACGCGACAACGACCACGTGCCCCGCCCGC
CCAGGCGCGCGGCCTGCCGGGAGACGCAGTCCAAACCTTTCGGGA
GCAGGACTAGGGGTCCCAGAGAGCCTCGCGGCGCGCATGCGAGCC
CCGG

[0135] In some embodiments, the intronic domain that promotes trans-splicing primarily in the brain comprises or consists of sequences from the gene STK25. In some embodiments, the sequences from gene STK25 comprise or consist of:

(SEQ ID NO: 82)
TTTCACCATGTTGGCTAGGCTGGCCCCGAACTCCCAACCTCAAGT
GATCTGCCTGCCTCAGCCTCCCAAAGTGCTGGGATTACAGGTGTG
AGCCACTGCTCCCAGCCTCTTCTAGGCACTTCGGAAAAGTGCAGC
GATTACTGACCACACGAAGGCCAGAGATGCAGCAGGCATCTATTT
ACATGCATTAAATACATATATTATCTTCATGCATTTACACATTCA
TTCAACAAACATTACTGAGCGCCTGCCGTGGGCTGGCATGGTCCT
GGGCACAGCTCCGCTTGCAGGAAGCCCACTTTCTCCTGGGGAGTC
AAAGCACAAACAAAGCCAAGTCAGTACGTAAAGAAGCAGGGGTGA
TGAGAGATGCGGACCCAGGAGGGGTTCAAGGGGCTGTCCTGGACG
CATGACAGGGAAGCATAGCTTCTTAAAGGACTCGGCAGTGCACCA
TGAGAAGACACGCACCAGGGAGCAGAGAGAAACGCCAGAACCCTC
TCGA

[0136] In some embodiments, the intronic domain that promotes trans-splicing primarily in the brain comprises or consists of sequences from the gene MOBP. In some embodiments, the sequences from gene MOBP comprise or consist of:

(SEQ ID NO: 83)
GTTCAATGGTATGTCTGTGAGATCAAAATGTGTTGATGTATGTCA
GCAGGTCAGCAGTTTGTTCTTTTTCCTTGTGTAGTATTTTATTGC
ATGAATGATGATTGTTTTAATAATAAATAATAATAAATTTTTTAT
TTTGCTTTTTAGAGAAAAGGCTTTTCCTAACTCTAGAATATTATT
TAGTCAAGGATATGTTTGGTTTTAAATGTTTTCCTATCTTACATG
GGTCTCTAAAACATAAGGAAAACAAGAGCCCATGTTTCTTTTTCT
CCTTAAAAACACGATTTTTAAAAATACACAAATGAAAATTAATGA
ACTGTTAGTTGAGTTCCTTTCCACAGAGTTGGGGGGAAGTTGGTC
TTCCAGGGTGTTGCTCTGTAGGGCCCCCCTGAATGTTACCTTGGA
TTATGGGAGTAGCAGGGGGCTTCCAGAGTAGAGGGCTCCCTTTCC
TGATGTGCGTTTATGTCTCCTCCTGTCTCCTTGCATCGGCGATTT
CCAG

[0137] In some embodiments, the intronic domain that promotes trans-splicing primarily in the brain comprises or consists of sequences from the gene MOBP. In some embodiments, the sequences from gene MOBP comprise or consist of:

(SEQ ID NO: 84)
TAAGCGGCCGCCCAGCCCCGCGGCACCAGTTGGGCACAGCGCGTG
GTCTCGGCTCCCAGCACGCCCCTCCCGCTCCGCACCCCACTCTTC
CCCCTAGTCGGCTCCGGGTTAGGCTCCGACACCGGAAGGCACTCC
AGGGAGACTGGAAGGTGGGTGGGGGAGCAGGGCCTTCCTACCTGT
TTCCAGCTCCTGCCAGCGTCGCTTAAGCAGCAGAGGAGAGCCCTG
GCTCCCGCCTCCAGCTTCTTTTGGCCCTCTCAGAACCAGCCGCCG
TGCCAAGTCCCCTCAGAGGCCCAAGCAACAGCCAGCTGCGCCCCC
CGCGGTGGTCAGAGCGCCAGCCAAGCCACGGTCCCCTCCGAGGTC
TGAGCGTCAGCCACGGTCCCCTCCGAGGTCTGAGCGTCAGCCACG
GTCCCCTCCGAGGTCTGAGCGTCAGCCACGGTCCCCTCCGAGGTC
TGAGCGTCAGCCACGTCCCCGCCCAGAGGTCCGACCACCGCCAGC
CAAG

[0138] In some embodiments, the intronic domain that promotes trans-splicing primarily in the brain comprises or consists of sequences from the gene HHATL. In some embodiments, the sequences from gene HHATL comprise or consist of:

(SEQ ID NO: 85)
GCAGGGACTGGGATGTGACAGGCTGGAGCTCAGGGACTTGTTGGG
GGAATGGGGGTCAGTGACAGGCTGGAGGCTTAATGCGAGGATGGA
GGCTTGGCTCTAGGGGCAGCACCTGGGGTGGTCATGGGATCTCAG
GGAGGGGAGTGGGAGTCAGAGAAAGGGTCTTAGAGAAGCTGGGGC
TTTGTGAGGAGCTAAGGGAGACTCACTGATCGAGGTGGGGACCCT
GCAGGCAGAAACCTGACTGTAGTGATAGAGGTGGGGTTTCTCCGC
ACGCAGGTCATGGGGGCCTTGGCAGGAGCGGTTTTGGCAGAGGGT
GGGGCCGGTGCCTCTGGAAGGTATGAAGATGTAAATGAAGGTGAG
GGAGGCAGGCTGCGAGTGAGGGCTCTGCGGGCAAGAGCCTTGATG
GGTGGGGTGGGGGCAAGAGCAGCAGCTGGGATGGGGCACTGGTGT
TCGGTGGCCTGTGAACTGTGGGGGGCACAGGGGCAGGCAGAGTGA
TGGT

[0139] In some embodiments, the intronic domain that promotes trans-splicing primarily in the brain comprises or consists of sequences from the gene HHATL. In some embodiments, the sequences from gene HHATL comprise or consist of:

(SEQ ID NO: 86)
ACCTTGACAGGTCCCTGCCCCTATCTGGCCCATGACCCCTCCATC
TGTACGAGGAGACCGTCGGCTGCTGGGGGGCCCAGGGGAGATGGC
TACAGGGCTGGGGATGAAGATTTAGGGGAGGATCAAGGGTGGGCA
AAAGGGCCACATCAGCCACCTCTTGGCCCCGTCAGCCCAAGAGTT
GCCTGGACATGTTCCCTGCTTCCTCCCTTTAATTTGGGTCCTATG
TCTGTATCCATGGAGTCCTTGGGAAGCCCCTGAGCCAGGCTGAAG
CGGGATAGGAAGGGTAAAGGTGCTAGCTGAGCCGTAGTACGGCCC
AGCAGTTCTCCAGGGGACAAGCTAGGCCCCCGCTGGAGGGAGTGG
TGAGACTCAGCCGGGGCCTGATTCTGGTCAGCACCTTGGACAGCA
GCCAGTGCCCTCCCTGGCCCCGCCTGGCCCCGCCTGGCCCCACAT
CCGCTACTCCTGGGCACCTCCTCAAATAGCACAGCCTCCAGCTGG
TGCC

[0140] In some embodiments, the intronic domain that promotes trans-splicing primarily in the brain comprises or consists of sequences from the gene SHISA5. In some embodiments, the sequences from gene SHISA5 comprise or consist of:

(SEQ ID NO: 87)
GAGGAGCAGCCGCGCCCTACCCCGCCAGCCAGCCTCCTTACAACC
CGGCCTACATGGATGCCCCGAAGGCGGCCCTCTGAGCATTCCCTG
GCCTCTCTGGCTGCCACTTGGTTATGTTGTGTGTGTGCGTGAGTG
GTGTGCAGGCGCGGTTCCTTACGCCCCATGTGTGCTGTGTGTGTC
CAGGCACGGTTCCTTACGCCCCATGTGTGCTGTGTGTGTCCTGCC
TGTATATGTGGCTTCCTCTGATGCTGACAAGGTGGGGAACAATCC
TTGCCAGAGTGGGCTGGGACCAGACTTTGTTCTCTTCCTCACCTG
AAATTATGCTTCCTAAAATCTCAAGCCAAACTCAAAGAATGGGGT
GGTGGGGGGCACCCTGTGAGGTGGCCCCTGAGAGGTGGGGGCCTC
TCCAGGGCACATCTGGAGTTCTTCTCCAGCTTACCCTAGGGTGAC
CAAGTAGGGCCTGTCACACCAGGGTGGCGCAGCTTTCTGTGTGAT
GCAG

[0141] In some embodiments, the intronic domain that promotes trans-splicing primarily in the brain comprises or consists of sequences from the gene SHISA5. In some embodiments, the sequences from gene SHISA5 comprise or consist of:

(SEQ ID NO: 88)
GTCTAGCTCTTTGGCAGGTTCGGAGCGACCTTGGCCGTTGGCCTG
ACCATCTTTGTGCTGTCTGTCGTCACTATCATCATCTGCTTCACC
TGCTCCTGCTGCTGCCTTTACAAGACGTGCCGCCGACCACGTCGT
AAGCGTGCCCACCCTGCCCCACTGTGACCCCCTGGGGTGGTAAGG
GAAGCTGACCAGGCCCTGCTTTGGCTAAGCTGGAGGGATGGGTGG
CAAGCCTGGCTCTCAAGACCTGGGGAGATGGAGGAGGGTCCTGAC
TGGAATTCTCTTTGCAGCGGTTGTCACCACCACCACATCCACCAC
TGTGGTGCATGCCCCTTATCCTCAGCCTCCAAGTGTGCCGCCCAG
CTACCCTGGACCAAGCTACCAGGGCTACCACACCATGCCGCCTCA
GCCAGGGATGCCAGCAGCACCCTACCCAATGCAGTACCCACCACC
TTACCCAGCCCAGCCCATGGGCCCACCGGCCTACCACGAGACCCT
GGCT

[0142] In some embodiments, the intronic domain that promotes trans-splicing primarily in the brain comprises or consists of sequences from the gene GNAI2. In some embodiments, the sequences from gene GNAI2 comprise or consist of:

(SEQ ID NO: 89)
ACACAGGATTAGCCAGCGACCTAATCCGCCAAGCTATGCAAAAGG
AGGCCTCTGCTGACCCCTGGCGGTCACCAGCCGGAGTCTGGCTGC
GCGGTGACCCACCACACGTTGCCCAGCCGTGTGGCTGGGATGGTC
GGTACCCATGGCCGTGCGGTCGAGCCTTGATGCTCCAGGACAGTC
CTGGAAGGCTTCCTGGCAGATCCGTGGGAAGAAAGCCGACAGAAG
GGCGGGAGGCGGGAGGGGAAAGGTCCCCCGGGATGGGTAGGGCCT
CAACGCTGGGCATCGGCGCAGGTGTGTACTGCAGGGAGCCAGCCA
GACCCCCCACGGACTGCCTGACCTTGGGGGAAGCCCGGAGTAGAG
GAAGAGGCCGGACCCCCAGACCCGCCATTGACTATGTCCGCCATT
GACTATGTGTTCTGAGAGAAATTTTTTTTTTTTTTTTTGAGACTG
AGTCTCACTCTTTCGCCCAGGCCGGAGTGCAGTGGCGCGATCTCG
GCTC

[0143] In some embodiments, the intronic domain that promotes trans-splicing primarily in the brain comprises or consists of sequences from the gene GNAI2. In some embodiments, the sequences from gene GNAI2 comprise or consist of:

(SEQ ID NO: 90)
TAAGCCGATGGCGGCTATCGCGGAGGAGACCCTGGCGAGGTGGGG
CCCCGCGCGGGGCAAGGGGGATGGGGTGCCACAGAGGGCTAGTTG
CAAGAGGACGCGTGACGGCTGCAGCTCTGCGGAGACCGGGCCTCG
ACGGCCAAGGAGTGGCAGGTCGGCGGAGGCGGGGGCCAGGCCCGG
AGGCAGAGCGAGACAGGAGAGCAGGCAAGGCGGGGGCCACCGTGA
GTGGGGGCCGCGAGGCGGGGGCTGGGGCGCGGGGAGGTGCTAGGT
CGGCCTCGGCTCCCGCGCCGCACCCCAGGCCCGCCAGGAGGCGCC
GCTGCCCCGCGAAGCCGTTCCGGCCTCTCCCGGCCACCGAAATCC
CGCGCTCCGGCCTAGAGAGGCCCCGGAAGAGGCGGTGCAGCGCAC
CCCGAGGCCGCTTCCGGCTTCGGCTCTGCAGGAGAGGCCAGAATC
GGGGGAGGACGCCTTGGGCGGGGCGTGGGTGAGAGAACCTGGGGG
AGGT

[0144] In some embodiments, the intronic domain that promotes trans-splicing primarily in the brain comprises or consists of sequences from the gene TKT. In some embodiments, the sequences from gene TKT comprise or consist of:

(SEQ ID NO: 91)
GGCAATTGCCCCCCACTTAGCTACCCAGCCAGGTCTAGCAGTGCC
AGAGGCTGTGCCTGTGTTTGCCTCAACACCAATTCCAGAGGGACC
AGGCATGGGGTGATGTGGTTTGGTCCCAGGGGGGTGCCCTGGGCT
GATGCCTGTTCACCAGTGTGTTGAGGGCAGACCTGGGATTGGAAC
CTGGGTCTCTGTGAGTCTAGAGATCCCACCTTCTGTACCCTACTG
CCCCTAGGGCCCTCAAAAGAGGAATCATGCAGTAGGCTCCCAGGA
GGGCCCTGGTCCCATAGGATGATGGGAACAGCCTGGGGCTCAGGT
CCTGTGCGTCTCCAGAGCCCACAGGCCCCTGCAGAGAATCTAGAG
GCAAATACTGGGACAAGGACACCTGAGCCATAGGCACAGGCCCAG
CCAGCAGCCTGGTGAGCCCATCTACACTGGCTAGCCATGCCCCAA
GGACCTGGGAGGCCTGGCTAACCCAAAGTAGAGGGACAGGAGGGG
CAGC

[0145] In some embodiments, the intronic domain that promotes trans-splicing primarily in the brain comprises or consists of sequences from the gene TKT. In some embodiments, the sequences from gene TKT comprise or consist of:

(SEQ ID NO: 92)
TGTCTGTCTCTTTAAAATAAAAAAAATCAATGAGTTATGTGATGG
GCTCATGGCTACAGGTGGAGAAAGGCAGTGCATATGCAGCCTCCT
CCATCCTTGACTAAGGCTGACAGAGGGCTGGGCCCACCACTGCTC
ACCCTGAGGCCTCGTCTTCTGACTCCCCTCCTTTCATTTCTAGGT
GGCATTGGTGAGGCTGTGTCCAGTGCAGTAGTGGGCGAGCCTGGC
ATCACTGTCACCCACCTGGCAGTTAACCGGGTACCAAGAAGTGGG
AAGCCGGCTGAGCTGCTGAAGATGTTTGGTATCGACAGGGATGCC
ATTGCACAAGCTGTGAGGGGCCTCATCACCAAGGCCTAGGGCGGG
TATGAAGTGTGGGGCGGGGGTCTATACATTCCTGAGATTCTGGGA
AAGGTGCTCAAAGATGTACTGAGAGGAGGGGTAAATATATGTTTT
GAGAAAAATGAATTGGCCCTGAAATGTTTTCTTTTTTGATGTGTT
TGCA

[0146] In some embodiments, the intronic domain that promotes trans-splicing primarily in the brain comprises or consists of sequences from the gene CLDND1. In some embodiments, the sequences from gene CLDND1 comprise or consist of:

(SEQ ID NO: 93)
GTATGTGAGCATTCAATAAGTACTTTTATGAGAATGAGTTTTGTT
TTAAGCTTAATTAAAAACATGCTTGCTTTCTAAAAAAAATTCTTA
ATGGTTATATGTACGAAGGGATGGGGAATTGGGTAAAGGGTGCAT
TTGGAATAATTCAAAATAATCTTTCTTATTTGTCCGTAAACTCTA
ACTTATCTTCTTTCTTCAACTTCTAAACAGAGCAGTCTGAATGCC
AGAATGGATAACCGTTTTGCTACAGCATTTGTAATTGCTTGTGTG
CTTAGCCTCATTTCCACCATCTACATGGCAGCCTCCATTGGCACA
GACTTCTGGTATGAATATCGAAGTCCAGTTCAAGAAAATTCCAGT
GATTTGAATAAAAGCATCTGGGATGAATTCATTAGTGATGAGGCA
GATGAAAAGACTTATAATGATGCACTTTTTCGATACAATGGCACA
GTGGGATTGTGGAGACGGTGTATCACCATACCCAAAAACATGCAT
TGGT

[0147] In some embodiments, the intronic domain that promotes trans-splicing primarily in the brain comprises or consists of sequences from the gene CLDND1. In some embodiments, the sequences from gene CLDND1 comprise or consist of:

(SEQ ID NO: 94)
TATGTTGCACTGAGGATTTAGGGAGAGAGCAAGATTTCTGTTGAG
GAGGTTCAGAAGTATAAGGAATCGGGAGAGTAGATAGGAGTGAAG
CATTTGGCAGCGTAAAGAAGCTTGGCTTAGCTTTAATGGATTAGG
GAGAGATTGCTATCTAGCATTATTACATGTTATTGTTCTCTTTGC
TATTTTATACACCTAGAACAACCTTTCCCTCGGGGTTAACAAACA
TCTTCAACTCTGTTTTCTGTATGGCTCCTGACTCTTACCTTTGTT
TTAGGAGGCTTCCCTCTTCAGAGGAAACTGGGAGAAGCCAATTTC
CACTGCTTCTTTTTCCTGTGCCTTTTTAACACTCAAACCCAGAAC
ACTTAATCCTCTGCAGCTCGTGCAAAAATTCAGTCTGTAATTTAA
AATGTGTGCACGGTACACTGCTGACCATGGGCATGTCTATTGTTT
GTATCTGTAATGTGTATGTCCATTTCAGTGTTGTCTGTTTTAGTA
TGCA

[0148] In some embodiments, the intronic domain that promotes trans-splicing primarily in the brain comprises or consists of sequences from the gene CD200. In some embodiments, the sequences from gene CD200 comprise or consist of:

(SEQ ID NO: 95)
TGGAGGCAGACACCTCTGTTCCACCTGCTTCCTTTGTAGATTGTG
TATGTGTGTGTGTTTGTGTGGAATGCATAGGGCTGCTCCATCTTC
TTTACTTACAGTGGTCACTCTGCCTGTTATCCTTTGGCCTTTTCC
TGCTCTTTGCTTCTACTTCTCCAAGCATGGACAAGATTGGTGAAG
CTGCTATCCTACCTGGCAGTTTACATCTTCAATCTCATTGTACCT
ACTTCGCAGCTTACACAGATCATTCACAATTTCTTGTAACTGAGA
GTTGCTCTCTTGTTTTTCTACTCTGCTACTATTCTTTAAAGATTG
AACAAACATATTTGAACCTATATATTTCTCTGGCATCACGTAGGA
ATGTAAATAAATGTTTTCTTTTTTGCATTTTCTCTTTCTTTTCTA
TATTTGACATTGAATATACATTTTATTTATAATCAGGAAAAAGTG
TATGTGTGTTACAATCTTTAAATATAAATGTTCTTTTATGATTCC
ATAG

[0149] In some embodiments, the intronic domain that promotes trans-splicing primarily in the brain comprises or consists of sequences from the gene CD200. In some embodiments, the sequences from gene CD200 comprise or consist of:

(SEQ ID NO: 96)
TGAGAATCTCTGAGAATCATTGTCTGTGTCTGGAAATACTATTTG
CAAGAATGTTTGGAATATAGCCGTAGTGCCCAGTTTTTCAGGATT
TTAACCACAGAAAGGGTCATGAGAAGATAGCCTTTCTTGTCTACT
ATAGCTGTGTTTATGATTATTTGGAGAGTTCATGGGGCTACACTG
AGTTCTTTGGCTGGAGCTATCTTTTCTCTGAGGGATCCTGCTGTC
AACAGGAGAAATTTGAGGACAATGGTGAGGGCAACAAGTTCTCCA
TAAGCAGTGATATGATTCAGACCTGGCTTTGCCACTAGCAATCAT
GCGACCCTAGAAGGGTCCTATCCACTCTCCACTGGAGTTTCATTG
TCTGGACAATAAGTGTGAAATAGATCATTTCTAGGGTCACTTACA
ACTTCAACTTTTTGGATCTAAGGACAGAGCCAGATTGGACTAGCC
TTGAGCCAGTTATGATTGTCCTTCTCATTTTGCTTGGGGAGATAG
CTCT

[0150] In some embodiments, the intronic domain that promotes trans-splicing primarily in the brain comprises or consists of sequences from the gene MCM2. In some embodiments, the sequences from gene MCM2 comprise or consist of:

(SEQ ID NO: 97)
TGGGAGCCCACGGGGTCCCCAGGAGCCGATCTGAGGAAGTCATTG
TGCAGCAGAGGGTTCCCCTCTTCTGCATATCCTGCCAGAGTGGGG
AACAGTGAAAGTGGGACCTGGGACACCTGGGTTTCCTGTTGAGTC
ATGTTCCTGGAATCACCTTGGATGTTCTCAGAAGGCATGGGAGGA
GAGCCCAGTGCCCCTCTGGCCAGGATGGAGTTGGCTGTTGGTCTC
AGCAGCGAATGCGTAAAAGAACCCAGGCTCTGTCACCCACTGTGT
TCTTGGTTTTTCCTCCTGGGGAAGCAGTTATGCTTTCTGTCTAAA
TTAGGCTATTTTGGGCCCTGGTTAGGGTAAGCTCTTTGCTGTCTC
AGACAGCAGGTGCTAAGTACCCACCTATGTCTTCCTCTTCCACTG
CCCTCATCCCCTTCTGCCATCAGAGCAGCCTGGGGTCCCTGAGAT
GGGAGGATAGGGGAATCCACCCTGATGGAGGTGCTCCCCTGTGTT
TCAG

[0151] In some embodiments, the intronic domain that promotes trans-splicing primarily in the brain comprises or consists of sequences from the gene MCM2. In some embodiments, the sequences from gene MCM2 comprise or consist of:

(SEQ ID NO: 98)
TATAGCTCACATGTGCCCGGTTTCCATGAACTGTGGTTTGGGGAC
CTCAGGTGAGGCTTGGGGTCATACAGTGTGCCCAACACAGGGGAC
AGGTGCTGCAGGGGCCATAGGCTGTTTTCTAGTCCTGTTCCCTCG
GTCTCTTCTCATGTCCAGAAGTCGCCCTGATTTCTCTTTCCTTCA
CAGCACCCCCGACCCCCACCCTACATAACCCACAATCCACCAAAT
CCTGTTGTCCCAACTCCTGAGCCTACCCACCTCCCTCACTTCTGC
CTCTGACTTGAGGCACTACCATCATCTGAACTGGCCTCCTGGCAC
CCATGTAGACTGTCTTCCAGTTGAAGGCATAAATCAGATCAGCCC
CGTCCTTAACAACTGCTTGAGGCTTTCTGCTGTCATCAGAATAGA
ATCCAGGGTCCTCCCCTCCGGCCCGCACCCGCCATCTCTGCAGCT
ACCTCCTCCTCGCTCCCTTCCCTCACCTGCACCTGCACCTGCCCT
TCTC

[0152] In some embodiments, the intronic domain that promotes trans-splicing primarily in the brain comprises or consists of sequences from the gene TMEM108. In some embodiments, the sequences from gene TMEM108 comprise or consist of:

(SEQ ID NO: 99)
AATGGGATAAACCTGGTTTTCTGAGTGGAGGCAGCTATTGATAAT
TTTACTTTTCTTATAGCTGAAGATGAAGGAGATTTGAGGTTCTCT
GAGAATTAAAATTCGGCTGGAGTTAGCCTAGGGTGAGACCCTCAG
AGCTGTCTGTTCATGCCATTGCCTCAAGCCTGTGGACGTTTTTTC
ACCCTGGGGCAAGAAGAGGCTCCAGTTTGCCCAACTGCTGTGTGT
GTTCCAGGCCAGTGTCCAGTGAGGCTGACTTGGCAGCTGCCCTTT
CCACAGCCAGCCAGCCAGCCCCTGAGTGTGTTTTAAAAGATAAGC
GACAAAAAGCCAACCCCTTTTAGAGGGGCTGGAACAGGCTAGTAG
TTGCTAGGCAAGTTAAAGTAATTCAGCGTCCTTGCCAAACGTCTG
CCAGGCAAATAGGGAACTTTCAGAGAAGGGGAGTGAGATGGTGGT
GTGTGTTGGTTGCCATAGGAATGTTTCCCTGATTGGAACAAGACC
ACAG

[0153] In some embodiments, the intronic domain that promotes trans-splicing primarily in the brain comprises or consists of sequences from the gene TMEM108. In some embodiments, the sequences from gene TMEM108 comprise or consist of:

(SEQ ID NO: 100)
TAGGTATTTTGTATTTATGTAAATATTATGTCAGATTATGTCTTT
ATTTTAGCTCTTAAGGTAGTAATTAAATATCTGTTCATGAATTAT
AGTTTTTATCGAGTTCTGATTTATAGGGGGAAAAGGCACAGTTGA
CCAAATTGTATGAAACCTTGGACCTTGAAGAGACCCTCTGATGTG
GGCTTTACTGCCGCATTAACAAGCACCCTGTGCATCTGGTGGCAG
CTTCCAGAATGACAGCTGAGGGTCTGAGTGGAAATAAGTGGCTTT
TAGCAAATGTTGAACCTCGAATGTGCTATTTAACCTCCCTGATTA
ATTGATTATCCAGCTCCGAAAATAAGAGGTGATATAGCTATCCCC
TTATCTCAGCATGGATGCTGTTCTCATTTGAATACAATTTGGGGG
GTAGGTGGGGGTAGTATCAGATCCTAGGGTACATGCTATGATAAT
GACAGGCTTAATTATCAGTCAGTCAATATTGTTTAGAACAAATGT
TTTC

[0154] In some embodiments, the intronic domain that promotes trans-splicing primarily in the brain comprises or consists of sequences from the gene EIF4G1. In some embodiments, the sequences from gene EIF4G1 comprise or consist of:

(SEQ ID NO: 101)
GCCAGGTGAGGGGCTGTGGGGAGGGGAGTAGGGGACCTGGGTGGG
AGCAGTGGAAAGCTTTGGCCAGTTTAGGTCTAGGATGGAAACTGG
AGGCCCCATACCTGGCCTTAATCCTCTGTGTTCTTTCATGCGGCT
CTGCGCCTTGCCCTGTTGATTACTCACGGTGGCTGGTCCCTTGGA
TAGTATGTTGTCAATGAGGGTGGCATTACTGGGATCCTAGTGCCT
CTGAGAATTGGGGGCAGTGCTTTGGGCCCTGCTGCCAGCTCTTGC
TTTCCTATTTGCTCCTTTTACCGGAGGCTGCTATTGCTCTATTGC
TCTCTCTGCTTTCTCTTTGGACTGTGGTGAGGTAAACACTCCAGC
TGGTCCTTGCCTTTCTCTGTTCCCCAGCTTCTTCCTTACTAAGTG
GGAGGATTCTTGTCCTGTCTTATTGCCTTCATTCCCTCCCCCCGC
CATCACCTTGGGGGTAATTCTCTTCTTTCCTATCCCCATGTGCTC
TCAG

[0155] In some embodiments, the intronic domain that promotes trans-splicing primarily in the brain comprises or consists of sequences from the gene EIF4G1. In some embodiments, the sequences from gene EIF4G1 comprise or consist of:

(SEQ ID NO: 102)
TAATATCCCTTTCCCAACCCTGGACAGTCTTCTGGTCTCATCCTT
ACCCTCCACCCTAGTCAGGGGCTAGACACAGGGAATGGGGATCTT
CAGGGTAGTGACTTGTTTGGTGTCCAGGTTCTCAGTTGGAGGCCG
AGTGATGCATGTTAGGGGCTACATCTTGAAGAACGCGCATCTGGG
GACTGGGATGCTGTTGCATGTTATGGTTAGCTCCTCATTACATGC
TGGTGGAGCAGTGCATGCTGGGGATATGTTGCCCGAAAGGGCCTT
ACTTAGGCATGATGCATCTCGGTGTTAGGAAGCCTCTGCAGAGGG
GTAGTTTGGTAGAGGTGACGTGTGTATGCATGGCAGTGAGAGAGT
AAATCTCTGCAGGATGCAAAGTGTACATCTGAATTTGGAGGTTTG
GAGGGCATGTGTGTGTACAAGAAGCCGCTTAGCCATTTGGTCAAG
TGGTCTTGGAAGGATTGGTCGCCATGTTCTGAAGCCCACAGTACT
TCTT

[0156] In some embodiments, the intronic domain that promotes trans-splicing primarily in the brain comprises or consists of sequences from the gene TACC3. In some embodiments, the sequences from gene TACC3 comprise or consist of:

(SEQ ID NO: 103)
CTATGTCTAGCAGCAGCCTCTGTAGGTGTCTGGCAGGACGGGAAC
ACCAGGCCTCATCTGGCCTCCCAAAAGCTTGGGCTCCTGGAGGTG
CTACTGTGGGGATCTGTCTTAGGCTGAGTGTCAGCCGGCGGCAGG
TGACCGCCTGGCCCTTGCAGTCCCTCCAGGACCACCACGAAGCAC
GACGCACATCCTGGAGCTCGCCATACCGGCTCCCAGGCCTCACCC
TAGGCTCTAGGGTGTTGGGCGCCGCCTCTTCAGGGACCTCTGGCC
CAGGCTCCAGTTCCCTGCGGATCTGATGTGGAGGAAACAGCTGTT
TCCTGGGCTTTGCATCCGGCCTAGAAGATCCTGGGTGGAGGGACC
CATCACCCTCCGAGGCTCACACCCACTGCCCACCTCTCCTCCTGG
CGCTCGAGTCCCTTGCCTCATTCCTTGGGCTGTCTCTGGCACCCA
TCGTTTCGGTTGCCTCCTCATCCTGAACGTTTGCTTTTCTTTTCT
CAAG

[0157] In some embodiments, the intronic domain that promotes trans-splicing primarily in the brain comprises or consists of sequences from the gene TACC3. In some embodiments, the sequences from gene TACC3 comprise or consist of:

(SEQ ID NO: 104)
TATGTCTCCGCCACCCTGGTGTCCTCACCTCGGAGGCTGATGGAC
TCATGGTCCAAGCCAGCGGGGCTACAAGCTGCTGTCTTTGCACCT
TGGTCCTTGGCCAAGCCTCCCCTTGCCACGGGGGCATGGGATGAC
CTGTGAACGAGACAGGGTGCAGGAGTCACAGCATAGCTGGTTTGC
GAGGCAGCTGAGGGCGGCAGGAGGCAGAGTGAGCAGGGAGGCCAT
CTGAGCCGTCCGCTGTTGTGTGACAGACGACTCGGCTATGATCAG
GCATCTGTGAGATTTGAGACAGCGCTGGTGCACCGGGGCCTGGGG
CACCTCGGAAAGGTGTCTGGGCTGTCCGAGCGCTTGGGTCCCAAG
GGTTGGGGACCCAGGGCATGCAGTATCCAAGGCGGGAGGCCCACT
GAAAGGTGGTCACGGCTGTGCAAGGCCACCCTGGTGTCCTCCTGG
CCACGGGACTCTGAGCGCCCCCCACCTTCTGTGCTGGGCAAGGCC
CACA

[0158] In some embodiments, the intronic domain that promotes trans-splicing primarily in the brain comprises or consists of sequences from the gene ADD1. In some embodiments, the sequences from gene ADD1 comprise or consist of:

(SEQ ID NO: 105)
GCCGGCCGGGGTGTACTCCGCGCGGGACCCTGGGCCTCCGCAGGC
CCCGGCGGGGTCGCCCCGAGGCGGGCCTGGCGAGTCCAATCGCCC
TGCCCGCAGGGGACCCGCCCCTCATGGGTCCCGCCAATCGCAGGG
TACGTTGCTCGGCAGTGCTGCGCGGCTTGGCCTATGGGACGGCGC
GTTGTTGGGCTGCAGCGCCGCAGGCCGCACCCAGGTCGGGCGGTG
GGGGCGAGCGGAGGGGCTGAGGGGCGGAGAGGCCTGGCGGGCCGC
TGCTGCGGGCCAGGGGACGGGGGCGGAGCCGGAGCCGGAGCCGAC
GGGCGGTGGCCGCACTGGGACCCCGGAATCCCGCGCGCTGCCCAC
GATTCGCTTCTGAGGTGAGGCTAGCTAGCGGGGGCGGCGGGGGCC
CGGTTCGGGCTGAGGCGGCGGCGGGGGCGCGGGGAACTGGGCCGC
GGTTGCGGCGGGCGGGGGCCGCGGGGCCTGCGGCGGCCCGGGCAG
CCTC

[0159] In some embodiments, the intronic domain that promotes trans-splicing primarily in the brain comprises or consists of sequences from the gene ADD1. In some embodiments, the sequences from gene ADD1 comprise or consist of:

(SEQ ID NO: 106)
TAAGTTAAAGAAAGATTTTTTGTGTGAAAAATTGACTGAGATCTT
AATGGGGATAGGAAATAGAATGCTGATAGGTCGACTGTGTCTATG
AGTAGAGGCGCCTAGTGAAAACAAGCTTGGAGTGGATGAGTAGGA
GTTCAACAGGCACCAGAGAGAGGAGGGCATTTCAGGCAGAGGGTG
TGAATTGTATGAAAGTGAGTTTGTAAACTTTGGAGCCTTGAATGG
ACAAAGGCCCGCGATGATACCTTTTTTTTTTGAGACGGAGTCTCG
CTCTGTCGCCAGGCTGGAGTACAGTGGCGCGATCTCCAGTCACTG
CAATCTCCGCCTCCCAGGTTCAAGCAATTCTCCTACCTCAGCCTC
CCGAGTAGCTGGGACTACAGGCGCGCGCCACCACGCCCAGCTAAT
TTTTGTATTTTTAGTAGAGACGGGGTTTCACCATGTTGGCCAGGA
TGGTCTCAGTCTCTTGACCTCGTGATCCGTCCGCCTAGGCCTCCA
AAAG

[0160] In some embodiments, the intronic domain that promotes trans-splicing primarily in the brain comprises or consists of sequences from the gene UCHL1. In some embodiments, the sequences from gene UCHL1 comprise or consist of:

(SEQ ID NO: 107)
CCTCCCGAGTAGCTGGGATTACAAGTACACACCACCACACCTACT
AATTTTTATATTTTTTGTAGAGATGGGGTTTCACCATGTTGTTCA
GGCTGGTCTTGAACTCTTGTGAGCTCAAGTGATCTGCCTGCCTCA
GCCTCCCAAAGTGCTAGTATTGCAGGTGTGAGCCACCGTGCCTAG
CCAGATCTCAGTGTCTTTATAACTACAACTGGCTGCCACTTTCTA
GCATTGACCTTGGTTGAGATAGTTAGCCTCTCTAAGCCTCAATTT
TCTCCTCAGTAAAAATCCTGTAGTAATAGCATCCTCATAGAGTTG
TTCTGACAGTTAACAGTATATTTACCTTAGTGGGCTTAGAATAGG
GCTTAATGTAAGACATACATTAAATATTAGCTATAATTTCTAAAA
ATCAAGTCAGAAAAATTTCTTGACTTTCTTTAG

[0161] In some embodiments, the intronic domain that promotes trans-splicing primarily in the brain comprises or consists of sequences from the gene UCHL1. In some embodiments, the sequences from gene UCHL1 comprise or consist of:

(SEQ ID NO: 108)
TATGTTTTACTCCATTTTTGGAACCCAGTGTAGTTTCATGTGTTC
TTTCAGACTGAATTTCTCTTGATATATTGTGTGACTTTATGGCAC
TTGGCATATCATTGTTTATAAAGCCACAATAACAAAGTATTCTCA
TGAGGGCACTTAACCCCTTATCATCCCCAGAGCAACTTCCTCAGG
CAACTGACTAGCATCCCCTAGTATCATCCTTTCTGGGCAAAGAGT
ACGTCTGAAAAAGGATCAGTGCCTGAATATGACCTTACTTGTCTA
AAAAGAATCTGAACATGTTGGAATAACTTCTATTAACTAGTTTAT
GGCATCAAGAAAGACGACCCACCTTGTAAGATTCATTCCTTTTGT
ATTAATGGAGAAAGACTTGTAACTCTTGTCTCAAGCCAAGATACG
ACCTACAGGCTTACAAAGGCAAAGGAATAGTGAAGGCAATCTACA
GTCATTGGAGGGCAGATAAAATCTCAGGCGTCTCCTCCTCTCGCC
TCCA

[0162] In some embodiments, the intronic domain that promotes trans-splicing primarily in the brain comprises or consists of sequences from the gene OCIAD1. In some embodiments, the sequences from gene OCIAD1 comprise or consist of:

(SEQ ID NO: 109)
ATTCCTAGGCTGCTGGCTCTCAGACCCGCAGTGAGGTCTGACGTC
ATTTCCTGCCGTAAGTATACAGTGCCTCCGGGTCGCGGTCATTTT
GAGCCCCTGTCTGGATGACTTCTTGCGGCTGTTCTACCCCTCCCC
CTCCCCGCGGTACCTTGCACTTTTCTCCCTCCCTGCCCCCTCTCG
AGTCCACCCTCCGGGCCTTCTGCCCCTGATCGCTTGGTTTTCCTT
GCAGTCGCCTGCTGCTGTCGTCGGGAGGTGGGTGAGGTGACGCAA
ACAGCCCCGTTGTTGCCCTCCGCGTATCCCCTCACCACCTTTGCG
GCCATCCACGACTTTCGCACCTTCCGCCATTTTCCTGCCTGTGAG
GGTGGACAGATCGCGCTCGGGTCTCGGCCTCCTGAGTGCCGGTGA
CTGCGGGAGGCGACGGAGTGCTTCTGGGGGTGTGAGCTGGGGAAG
TTCGTGGTCACGGATGCGTGTGGGGTTGCTGCTCAGTCTGTAACG
GCAG

[0163] In some embodiments, the intronic domain that promotes trans-splicing primarily in the brain comprises or consists of sequences from the gene OCIAD1. In some embodiments, the sequences from gene OCIAD1 comprise or consist of:

(SEQ ID NO: 110)
TAATCAGCGGTTGTAGGCCGCTTAGGCTTTAATCCAGCGTTGTTT
TGTGTAAAGAACTTAAAATGGTATTGTCTTAAGCGCCGTGTCAGC
CCTGACAGTCTTCCTGGTGTTTCTAGGAAGGATGCCGTTATGGGA
AATAAGAGGGTTTCATTTTTTCTCATACGGTTGTAGGGTAAAGGT
AGTTTATTCAGCAGGCTCCATCCATCCATGAATTCAGCTGACCTT
TTTTATTTCTTTTCTCTAATTAAGGGGTTGGCATGTAGTAGGCCT
TCATGGCTTATTGACTGAATGAATTATGGAAGGGCTCAGTTGCTG
TCCTCATTGTGTATGCCATTTCCTGTTTCCATGCAAATTGTTTTT
AAAATGAGAATAATCATGATCCCACGTAAACGTTCTGTAAAATAC
GGTTACTTGATCTGTTGGTCTGAGTCCCAATATATGAGTTTTTAA
AAAAAGAACCAAATAAAAAATGTATATTCTTGGAATTTTATGCAT
TTTT

[0164] In some embodiments, the intronic domain that promotes trans-splicing primarily in the brain comprises or consists of sequences from the gene SPP1. In some embodiments, the sequences from gene SPP1 comprise or consist of:

(SEQ ID NO: 111)
ACGTATTTGCTGCGATATTACTTATCTTCTCAGTCAAATCCATTG
GTTTACAAGTATTGATTGACTGCCTGCTATGAATCTAGGCCAGTA
CCAAGCACAGTATAGTTTTTAATAAATATAAGTTTATAAAACCAA
CCCAGATATTTTAAATATAATAATATCTAGGCATGTATGATGAGT
TATCGCATGTAAGATAAGTTATATGAAGTTGTGTGACTTTTTTTC
CATTAGTCCACATACTGATCTAAAAGCAGAAAATTCCAGCTTTTG
CTTTGTTTAGTGGATTGCTAAGTTTAAAATTCACATTGGATATTA
GTCAGAACTGTTTGTATGACCATAATATTCACAATATTGTCTGAG
ATATTAGCTGAGAAGCCCATTGTGAAAAGAAAGTCTATGTGTGCT
GTTTGTATCTATTGTGATTGTCAGCTGATGTTAGATCACATTTTC
TAACCAAACATAAGACCAACCAAACTCTTTATTATAATTATTTGA
CCAG

[0165] In some embodiments, the intronic domain that promotes trans-splicing primarily in the brain comprises or consists of sequences from the gene SPP1. In some embodiments, the sequences from gene SPP1 comprise or consist of:

(SEQ ID NO: 112)
TATTCTGTGTTCGTTTGTGTGTGGAGGGGTGTGTGTGTCTGTTTT
TCAACTGATTTGAAAATACAGGTGTTGAATCCTAATAATAAACCA
GAAAAATTAACATCTCCAGAGAAGATAGAGGTCATACTATTTGAG
GCAAGAATTAGCGTCTTTTTAATAAACGAAAATATGGCAAAGATG
CATTTTAGAAGGCACGTGGAGCTATAACAATTTAAGAAATACGTG
AAGAGCTCAAGGCTCAGCCTTCTAGAATCCCAGAAACTTAAAGCT
AGTAAAAAATTGGGGAAGTCTCTAAGGATATATGCCTGAAAATAC
ACACTGGTTATCTGTGAGTGTTAGGATTACTGGGTGGTTTTTAGT
CTATTCATTTTGCTTACCTTTATTTTCTTCATATTAGTTTTTAAA
AATTATAAATGTAACTTATACATCCATTCTCTCTGAGCCTGTATT
ACATGTGTCATGAGAATAGATAGATAGATATGAAAAAGTGAAGAG
AAAA

[0166] In some embodiments, the intronic domain that promotes trans-splicing primarily in the brain comprises or consists of sequences from the gene NREP. In some embodiments, the sequences from gene NREP comprise or consist of:

(SEQ ID NO: 113)
GCAGGGAGATGATCTCCTCCTCCTTTTTCCAAGGCTGCACTTCTT
GGAAGTGAAGCCGGTTTGGGTTTTGTTTCCCTTCCCCCTCCTCCC
TCCTCTTCCTCCACCCCTTTCCCCTCCCCCTCCCTCCCCCAATCC
CCCCTCCCCCCCCAATCTGTCTTTCTAGCATGTTGCCCTTTTTCA
ACCACATTTGTGTTTCAGGTGTAGAGAGGAGAGAGAGTGAACAGG
GAGCGGGGCTTTTGTCTGTAAGTATATGCCATTCCTATCCCCGGC
TGGGAGCGCTGGTTTCTCTTTTGTGTCGATTCCTTGCCGTTGCTC
TTAGCTGGACCCTTCAACCCTGCAGAGTTCATGCTTCTTCCCTCT
AAATTTTAAAGAGCTGAAGCGTGTACCTTGGAGAAATTCTGGCAT
TTTGGTTGTGCTGCATTCAGGCTGGAATTTAACTTGGGTTTTTTC
TAAAATGCACAAGTTCGGAGGGAGAAATGAATTCTTTTGGGAAGG
GGTG

[0167] In some embodiments, the intronic domain that promotes trans-splicing primarily in the brain comprises or consists of sequences from the gene NREP. In some embodiments, the sequences from gene NREP comprise or consist of:

(SEQ ID NO: 114)
ACGGCCCTGGCGGGCCGCCGGGCTGTGCAGCACCCTGGCCGCCTT
CACGCTTGGCGCGCCCCCAAACCGCCTCCTCCACCTCCTTATTTG
TCTGAAAAGCAACCGCACGTCGAGGCGGAGAGGCTGGCCGGGGGC
GGGGAGGAAGGCCGGGGATTTGCGCGCGCCGTGCTCCCGGGGCGG
GGCCGGGGCGCAGAGCTGCGGGTCCGCTTTGTCTCCCCGGGGCGC
CGCGCGGTGCAGTGGGGACGGCGCGGCGAGCGGGGCGCCCGGGGC
GCGGGTGCGGGGTGTCGGGGCGCGCGCGCCTGTTGGCCGCTCGCC
GACGGGGCCCAGAGCCGCCGATTCCTGCCGAGTAAGCAGTCTGGC
TCCTAGGCGGCTGCACAGTGGCAGCAAGGCTGGGGCGCTGGCTCC
GCGCCAGCTCCATCAGAATTAGCTCATTGTTCACTAGCACCCTAG
CGGGAGAGAGAGGGAAAGGGAGAGAGAGAGACTCTTAGAGAAAGA
GAGA

[0168] In some embodiments, the intronic domain that promotes trans-splicing primarily in the brain comprises or consists of sequences from the gene HSD17B4. In some embodiments, the sequences from gene HSD17B4 comprise or consist of:

(SEQ ID NO: 115)
CAAATCTTTACCATCCCTAAGGGGGACTTTCCTTCCCAGGGGCTA
TCTCTGGAAGCCCCTCAAGGATAGGGGCCGCATGCTGTTTCTCTA
GGTCAGCAACTAAACCCAGAAAACGTTTATTGAGTGAATGATGAA
ACGACAGGTGAATAGATGAACGCAAGGTGTCGAGTTAACTATTCT
TCTACACAAGTCCTAGCAGCTCCCATTGCTTCCAGCCGCAGAAAT
GGCCCCTGGAAGGCAAGTCTTCCAGCGAGTGGAGTCACTCTTAAC
TACATTTCCCAGGATTCCAAGGGAGCCGCGCGCTCTGCGCTCATC
TTCCTACCAGAAATCGGCAAGTCACTGACCCTCGTCCCGCCCCCG
CCATTCCCCGCCTCCTCCTGTCCCGCAGTCGGCGTCCAGCGGCTC
TGCTTGTTCGTGTGTGTGTCGTTGCAGGCCTTATTCATGGGCTCA
CCGCTGAGGTTCGACGGGCGGGTGGTACTGGTCACCGGCGCGGGG
GCAG

[0169] In some embodiments, the intronic domain that promotes trans-splicing primarily in the brain comprises or consists of sequences from the gene HSD17B4. In some embodiments, the sequences from gene HSD17B4 comprise or consist of:

(SEQ ID NO: 116)
TACAGCCCGCTTCTCCCCAGCACCCCGGTGTGGGCTTCCCAAGGTCCTG
CCTGAGAGGAGAGGCCAGGCTGGGCTGCTGATTGCAAAACTGGGTGAAA
GTTCTCCCTGACCCTTATCTGTGGGCATCGATTGTTACTCTTCCTGCAA
TTAACTCTCTTAGATCTTTGCCTAGTCTTTTAAAGGACTGAAAAGCCGC
GAGGGGCGGGGGCTGGAATTCGCCCCCTGAAGCGCAGAGATGTCAGCTC
CTGAAAAGTCATTCGGTCGTTCAGTGTTTGTTTCCCTCTGTCGTAAGAT
TTTAAGTTCGTGAGAGGACCTTCTTTAAAGAGGGCGTCTGATAAGAGCC
CTTCCCCGTTGGAGTTTGTATGCTTAGCAAGTCACAATCTGTTCTCGAA
ATCCACTGGAGTCTTGGCAGAGGTTGTAAGCTCAAATGCGCACAGGGGT
CAGGCGTATGATGGAGAAAGAAAATGGGAGTAGGATGGGCACATCTGAG
GAACTGGAG

[0170] In some embodiments, the intronic domain that promotes trans-splicing primarily in the brain comprises or consists of sequences from the gene LMNB1. In some embodiments, the sequences from gene LMNB1 comprise or consist of:

(SEQ ID NO: 117)
TGGCCGGGGACACTCTGAGTTTCGCGTGTGGCTTTTAGGGACGTTTATA
TTTGAATTTCCCTGAACCGCCGAGTGTGGGCGGTGGCGCAGATCCGTCC
CGGAAACCTCCGGGCTCCTTCCCGCCTTTCTCAGGCCCGGCCCCTCCAA
GGGGTCCCCGCGGGGCGGCGGGAGGGCCCTGGGCCCAGAGCCGCGCGGG
TGGGCAGTCCCAGGCGTCCTTCCTTACAGCCCTGAGCCTGGTCCGGGAA
CCGCCCAGCCGGGAGGGCCGAGCTGACGGTTGCCCAAGGGCCAGATTTT
AAATTTACAGGCCCGGCCCCCGAACCGCCGAAGCGCGCTGCCTGCTCCC
CATTGGCCCATGGTAGTCACGTGGAGGCGCCGGGGCGTGCCGGCCATGT
TGGGGAGTGCGGCGCCGCGGCCCGCGCCACCTCCGCCCCCCGCGGCTTG
CCTCCAGCCCGCCCCTCCCGGCCCTCCTCCCCCCGCCCGCCGCTCCGTG
CAGCCTGAG

[0171] In some embodiments, the intronic domain that promotes trans-splicing primarily in the brain comprises or consists of sequences from the gene LMNB1. In some embodiments, the sequences from gene LMNB1 comprise or consist of:

(SEQ ID NO: 118)
TGAGTGGGTGTGTGTGTTTTCTTACAAAGGGTATTTCGCGATCGATCGA
TTGATTCGTAGTTCCCCCCCGCGCGCCTTTGCCCTTTGTGCTGTAATCG
AGCTCCCGCCATCCCAGGTGCTTCTCCGTTCCTCTAAACGCCAGCGTCT
GGACGTGAGCGCAGGTCGCCGGTTTGTGCCTTCGGTCCCCGCTTCGCCC
CCTGCCGTCCCCTCCTTATCACGGTCCCGCTCGCGGCCTCGCCGCCCCG
CTGTCTCCGCCGCCCGCCATGGCGACTGCGACCCCCGTGCCGCCGCGGA
TGGGCAGCCGCGCTGGCGGCCCCACCACGCCGCTGAGCCCCACGCGCCT
GTCGCGGCTCCAGGAGAAGGAGGAGCTGCGCGAGCTCAATGACCGGCTG
GCGGTGTACATCGACAAGGTGCGCAGCCTGGAGACGGAGAACAGCGCGC
TGCAGCTGCAGGTGACGGAGCGCGAGGAGGTGCGCGGCCGTGAGCTCAC
CGGCCTCAA

[0172] In some embodiments, the intronic domain that promotes trans-splicing primarily in the brain comprises or consists of sequences from the gene SKP1. In some embodiments, the sequences from gene SKP1 comprise or consist of:

(SEQ ID NO: 119)
GTACGCAAAGAGAACCAGTGGTGTGAAGAGAAGTGAAATGTTGTGCCTG
ACACTGTAACACTGTAAGGATTGTTCCAAATACTAGTTGCACTGCTCTG
TTTATAATTGTTAATATTAGACAAACAGTAGACAAATGCAGCAGCAAGT
CAATTGTATTAGCAGAATATTGTCCTCATTGCATGTGTAGTTTGAGCAC
AGATCCCAAACCTTACGGCCAAGTTTCTTCTAGTATGATGGAAAGTTTC
TTTTTTCTTTGCTCTGAATAAAACTGAACTGTGGGTTCTCTATAAGTGG
CATTTTGGGCTTTCCCTCTTTTTTGTAAAGCAATGTCTGCCTAGTTTAT
TGTCCAGTTAACTTTAGTGACCTTTTAAAAGTTGGCATTGTAAATAAAA
CAACTTGCAAAAAAGTTTTCTGGAATAGAATTAACAAAATATTATCTTT
ATTCATGAGTTGGAAACTGGAAAAAGGCTTCTTGAAGTAAATGTTCTGA
GTGGAGCTA

[0173] In some embodiments, the intronic domain that promotes trans-splicing primarily in the brain comprises or consists of sequences from the gene SKP1. In some embodiments, the sequences from gene SKP1 comprise or consist of:

(SEQ ID NO: 120)
TATAGTGCTATAACTGCTTACGTTTGAACTCTTTAAGTGTGGACAAATA
TTTTTGCCAAGACCTGATGTGGTATTTGTGTGCATGTGTACACACATAC
ACAACAGTAGTGGCCGTTATTTCACATTTGAGCTAGTATAGTTTGGTTA
AGGAAGCAGAAGGATTCAACATTATAGAGGTATAACAAAGAAGGTCACA
TAAAAGTCTTTCACAGAAGAACTTAGGAGTGATTTATTCTTCTCCCTTT
AATTTCTTAAAATTAGCATTTTAAGCTTTATTAGATACGGAGTGTCAAT
CATTAACTTTGGATTTAGTTTAAAACATCAAGTATACTTTAAGGAAAAC
AACTGTCTCTTTACAGGCTGCAAACTACTTAGACATCAAAGGTTTGCTT
GATGTTACATGCAAGACTGTTGCCAATATGATCAAGGGGAAAACTCCTG
AGGAGATTCGCAAGACCTTCAATATCAAAAATGACTTTACTGAAGAGGA
GGAAGCCCA

[0174] In some embodiments, the intronic domain that promotes trans-splicing primarily in the brain comprises or consists of sequences from the gene REEP2. In some embodiments, the sequences from gene REEP2 comprise or consist of:

(SEQ ID NO: 121)
CCTTTCAGATTAGAAAGGAGCAGTCCCATGAGCCCCATGGGGACCCCAG
TGCACTAAGAGTGAGGGGCTGTGCAGGGTCACACATGGGGCCGGTGCTG
CTGGACACAGGGCACCTCCCAACTCCCTGCCCTGTACTCTGCGCTTGCC
CCTGTCCCAACAGGTTCCCCTTCTACTTTGAACTGAAGATCGCCTTCGT
GATATGGCTGCTGTCCCCTTACACCAAGGGCTCCAGCGTGCTCTACCGC
AAGTTCGTGCACCCAACGCTGTCCAACAAGGAGAAGGTTTGCCCCCACT
CTCAGCTCACCTCCCAGCCTGCCCCCAGCCAAGGCAGTCCAGAGCCTGC
AGCCTCATACAGACTGGCCCTCCCTGTGGGGCCCAGAGCCCAAAGTGAC
TTGGCAGGGCTGCCGTGGCCTCCCGGAGCAGGCAGGGGCCTCTGTCCAG
GGGTGAACAAGGGTAGGGCAGGACCTCTCCTCTTCTCCCTTCCCCTCCA
ATCCCATAG

[0175] In some embodiments, the intronic domain that promotes trans-splicing primarily in the brain comprises or consists of sequences from the gene REEP2. In some embodiments, the sequences from gene REEP2 comprise or consist of:

(SEQ ID NO: 122)
TGAGATGGGGGCAGGCTCAGACTCCCAGGGCCCCTACCTTGTACAAAGG
GCCCTGGCCAGGCCCCTTTGCATCCACCCTGTACTCGGGGCTGTAGAGA
CTCTGGGCTCATGCAGCTGGAGGCTCCAGTCCAGGCTCTACTGCTATCT
GGCCGAGTCACTTTGATTGTCCGGCCATTTCCCCATCTGTCCCCAGAGG
CAAAGTGTGGCCCTGCCCCAGCCCTCAGCTCTGTCTGTGTGGGACTGGG
TGAGGACAGTGTGGGGAGGGCACCGAGCCTGGGGCTGCTGCCAGCACCA
TGGTGACCTCTATCTCCACCCCGCCCCTTCCCCCCGGCTCTCCCGGTGC
GTGGTGGTGACCCTAGGGCCAGGGGGTGCTGTCAGAGAAGCTCCGCAGC
TTCAGCATGCAGGACCTGACCCTGATCCGGGACGAGGACGCACTGCCCC
TGCAGAGGCCTGACGGCCGCCTCCGACCCAGCCCTGGCAGCCTCCTGGA
CACCATCGA

[0176] In some embodiments, the intronic domain that promotes trans-splicing primarily in the brain comprises or consists of sequences from the gene MATR3. In some embodiments, the sequences from gene MATR3 comprise or consist of:

(SEQ ID NO: 123)
CCCTTTGTGGCCCCAATATCTGGCGCTTTCCACCATTCCTTGGCAAACA
GAACAACCAGAGAGCATAAAAGTCGAGTCTAAGCCAGGGACTCTCGCGA
ATCCCTTCTAAGGCATACCCTATTTAAACTTTGTATTATGCTATTCAGG
AGGTTGACAAACAGCCTTTTCGGGAATGGGACTCGAACTCGTAAGCCAC
GTCTGTTCCTCCATTTCCCGCCTCAGCTGGATGACGGAGAGGGATCTCC
GGGATTAAAGAACAACGACCGCAGGCGAGTGCACGAGCGAGGTGCGCGC
GCTGAGTAGGGGGAGGGGCCTGGCGCGCGCCGAACCAGATCGAGGGGGT
GGGGGCGAGCTCTCTCGCGAGAGTGGGTTTGTTCTTGGGCTGCAGCCGC
TGCCGCCGCTTCTCGCCAGCGCCGTTGCTGCGGGGGATTGTGGGAGTCT
CCGCGTCCCGCTCGCTGGGAGAGAGGTACCTCTCCTTTTCCCTCTCCCT
TTCCCTAAG

[0177] In some embodiments, the intronic domain that promotes trans-splicing primarily in the brain comprises or consists of sequences from the gene MATR3. In some embodiments, the sequences from gene MATR3 comprise or consist of:

(SEQ ID NO: 124)
TGAGCGGTCCGGGAGGGAAACACGCGGCCGGCCAAGGGCCCAGGGTGCG
GCGGGAGATTTTGGGTGAAGAGGTGCGCTGACCGGCCGAGCTTCCTGCG
CGTCCTGGGCTCGTTGTGGGCGGGGGCGGGACGACTAGCCCGTTACACG
CGGGCCGCGGCGCTGAGGGGGAGGGAGGAGCTCGCTCGAGGCCTGAGGG
ACAGACTGTACACTGGGGGCTTGCCGTTTGAGGAGGATGGTTAAGATAT
CTAAGTCCTTGGGTAGCGCCAGTGCCAAATAACCCGTTCGCCTTTTTTT
CTCTGAAAATGTTCCCCCAAAATGGAGGATTTCGCAGACTCTGAAGAGC
CTGCTTGTTTGAGCAGCGTTTCTTTCTTTTCCCGGTGTCTCGGCCTTCA
CGCCGCTCCTTGCCCATCGCCTCAGAGCGCCCCCTAAGACTCCCGGCCC
ACACGCGCGCGCGCGCGCGGCGTTAGCTGGACATCAGAAACAATTCCTC
CCCGCCCCC

[0178] In some embodiments, the intronic domain that promotes trans-splicing primarily in the brain comprises or consists of sequences from the gene CAMK2A. In some embodiments, the sequences from gene CAMK2A comprise or consist of:

(SEQ ID NO: 125)
GTAACAGGTCCTCACCCTCCACAGTCCTGGCCATGGGACTAGCTCTGCC
TGGGTCTCCACAGAGGCCAGGAGACTCGCTCACTAATTCTTTCCTTCAT
TGATTCAATAAGCATTTATTGAACACCTACTGCATACTGGACAGCAGGT
TGGGCTTGGGGAGTGAGCGGTGAATGACTGAGCCCTTGCTCTAGTGGAG
AGGACAGACAAGTTCCTGGGGCGTTATGGGGCAGTGGTGAGTGCCATGC
CTGGGAAAGCCTCAAGATGGTGGCAGAATGCAGCAGGACAATGGTATTC
TGGGTCTGGAGCCAGGGGCGTTTAAGCTGAGACCTTGGAGGATAAGCAG
GTATTAGCCAAGTTAGAGTCAGAATGGGAAAGTGTGGCCGGGCGCAGTG
ACTCATGCCTGTAATCCCAACACTTTGGGAGGCTGAGGTGGGCAGATCA
CCTGAGGTCAGAAGTTCAAGACCAGCCTGGCCAATGAGGTGAAACCCTG
TCTCTACCA

[0179] In some embodiments, the intronic domain that promotes trans-splicing primarily in the brain comprises or consists of sequences from the gene CAMK2A. In some embodiments, the sequences from gene CAMK2A comprise or consist of:

(SEQ ID NO: 126)
TCCCATCGCCGGAATGGGACACTGTCACCCCGGAAGCCAAGGATCTGAT
CAATAAGATGCTGACCATTAACCCATCCAAACGCATCACAGCTGCCGAA
GCCCTTAAGCACCCCTGGATCTCGGTGAGCCTTCCTCAGCAGGACTTCT
CCCAGGAGCCCCTCCAGACCTCATGATCCAGGCCCCCACAGAGTTCTGG
CCCTTCCCCTGGCCCATGGGGCCAAGAGGGCTTAATCCAAGAGACTGCC
CCTGCTGTGGTTCTCAGGGGTAATGTGGAAACGAGGAGTGAGTGTTCTG
GGTTGGCATACAACTGATGGTGCTACTGGCATTGAATGTCTGGTGCCAG
GATGCTAAACACCCTGAAGCATCTCCTAGAGCAATGAATCGTTCTTCCC
AAGATGTCAACCACACCTCCATTAAGATGCCCTGCTGAAGGGTACCCTT
GGGTGGGCCTGTCTTCCAGCCTGCCTTCCACTCACAGCCCTCTCCCCTA
CTTCCTCCA

[0180] In some embodiments, the intronic domain that promotes trans-splicing primarily in the brain comprises or consists of sequences from the gene CYFIP2. In some embodiments, the sequences from gene CYFIP2 comprise or consist of:

(SEQ ID NO: 127)
AAACCAGTTTTCAGAGAATTAGAGTTGGATATCAACTGGACAGCACCCA
CAACAGATTAGACTTGGATTCTTCCTTTGAGGACTTGAGAGGCCGTCAT
GAGAAGAGTGCTTCTCGGCTCCTAGGGATGGTGAGACAGGCCCTCCAAC
AGGGCTGCAGATGGGGGACTGTCTGAGGCACTGACGGCCACTGTGGCTG
CTTTCCCACAAAGGAAGCCCTGTGGCAGGGATGGTGGGTCACACGTTTC
TGTGGCTGCTCTACCCGCATCAGTGCCAGGCATGTGATGGGGGAGATCC
CAGGGAAGCTCCAGAGGCAGCGAAGACGAACGCGGTTGCTGGGAGGTTG
GAGTGTCTCAGAGGTGGCCCCCGGCAGTCGCGGCGGCTTTCCCACCGTA
TACAATACCTCTTGCTTTTCTCTCTCTCTCTCTCTTTCTCTCTCTCCCT
CTTCCCTGTCTCTCCTGCCCTCCCATTCCCTCTTCCTTCTCTCCTATCT
ATGTCTTAG

[0181] In some embodiments, the intronic domain that promotes trans-splicing primarily in the brain comprises or consists of sequences from the gene CYFIP2. In some embodiments, the sequences from gene CYFIP2 comprise or consist of:

(SEQ ID NO: 128)
TATCACACCGCCTGGCTGGGTTGGTTTGGGTACCCTTCTCGAGGAGGCA
GCAGGAATGGACTAGCCTGGCTCCTCAAGGCCCCTTCCAGCCCTAAGAT
TCACAGACAAATGATGTGGAGAGATCTAGATTAGCAAAGAGAACCACCC
CACCGCACTTGCATCCTTTGCACTTAAGGCACCCTGTAAGCGGGAGTTA
ATTGTCTAGTAGCCTCCTGTGTAAGTACCAATGTTAACCCGCCTTCCAC
CCTGAACTTCAGCAGGCTGTGCAGTGCAGCTGATGCCACCAAGGGGGCG
CCATCGCTCAGCCATGGGGTCAAAACGCTGAGGGTCAGGAACAGGTGTG
GGAGGGGGTTCGTTCTGATCTTATCCCATTTCTCAGTTCCTCAGAATGT
TAGTGCTGAAAGGGACTGGTGTGAGAAGGCATCTGGTCCAACCCCCTCA
TGTTACATGAGACAACTGAGGCCCAGAGTGGGGGCTTTGTTGCCTAAGG
TCACACAGC

[0182] In some embodiments, the intronic domain that promotes trans-splicing primarily in the brain comprises or consists of sequences from the gene PTTG1. In some embodiments, the sequences from gene PTTG1 comprise or consist of:

(SEQ ID NO: 129)
GCCAATTGGGCCGCGAGTTGTGGTTTAAACCAGGAGTGCGCCGCGTCCG
TTCACCGCGGCCTCAGATGAATGCGGCTGTTAAGACCTGCGTGAGTGAA
TGGGAGGGTCGCGGGTGGTTAGTTGAGCCGGCTCCGGCGGGGAAGGAGG
CGGGCTGCGGCTGCGGCTGGGGCTGAAGCTGGGGCTGGGGTTGGGGGAC
TGCCCGGGGCTTAGATGGCTCCGAGCCCGTTTGAGCGTGGTCTCGGACT
GCTAACTGGACCAACGGCAACTGTCTGATGAGTGCCAGCCCCAAACCGC
GCGCTGCTCGGGACCTTAGAGCCTCTGACTCAGGCTGGAAGATTTGAGA
GCTGGATTAAGTACTTGTTGGCTCACGCCCGTGACTGTTCCGCTGTTTA
GCTCTTGTTTTTTGTGTGGACACTCCTAGGATAGAAAGTTTGGTATGTT
GCTATACCTTTGCTTCTCCCACCTTCCCCAATATCTAATATGTATTTCT
CATTCTTAG

[0183] In some embodiments, the intronic domain that promotes trans-splicing primarily in the brain comprises or consists of sequences from the gene PTTG1. In some embodiments, the sequences from gene PTTG1 comprise or consist of:

(SEQ ID NO: 130)
TAAGTATACAAGGCTGCAGTCGGATACACTGGTATTGTGGACGTGGCCT
GGAGCTGGACGAGACATTTAGTGTACTTTTTGGGCAATTGGAGTCGTTT
GTTATTGGTCCTTTTTCATTTTTAATATCTTAATGAGATGATTTAAGGA
AGTTACTGAATCTCTGCTATTAGGCCTATCATAGCCATGCCACTACCAA
AAGTGGGGGGTGGGTTTGGGGGTGAGAGGTCAAGTTTATATACACAGTA
TTTAAGTTGTACAGGTATTTTGCTGCTGGAATATTCTTATGGTAAGACT
TTTTCTTCAGCAATCAAAGCCTTAGATGGGAGATCTCAAGTTTCAACAC
CACGTTTTGGCAAAACGTTCGATGCCCCACCAGCCTTACCTAAAGCTAC
TAGAAAGGCTTTGGGAACTGTCAACAGAGCTACAGAAAAGTCTGTAAAG
ACCAAGGGACCCCTCAAACAAAAACAGCCAAGCTTTTCTGCCAAAAAGG
TAAGTGTTG

[0184] In some embodiments, the intronic domain that promotes trans-splicing primarily in the brain comprises or consists of sequences from the gene SQSTM1. In some embodiments, the sequences from gene SQSTM1 comprise or consist of:

(SEQ ID NO: 131)
GCCGCGTACCAGGACAGCGAGAGGAAGGCGCACAGGCAGAAGAGC
AGCAGCGTCAGGAAGGTGCCATTGCGGAGCCTCATCTCCTCGGGT
GCGCGGCGGGCGCCCGCGGGGCCGAGGCTGCATGGCCCGGGGGAC
CGGGGCCGGGGCGCAGGGGTCGGAAGGCGGCGGCGGCGGCGGCAG
GGGCCCCGGCCCCGGGTCGGGGAGGGGCGGGGGGCCCGGGGCCGG
GCGGGGACCGGGCCAGGGAGCGCGCCGGCCGCCCCTCAGGGCGCA
AGCTTTGTGCCCTGTACTCAGGGAAGAGGAACAGGCTCAGAAGGG
CAGAGGCAGGTATCAGGCTCACTGCAGATATCAGGGGCGCGGGAC
ACTGGCGGCCTCGCCTCCGCGGCAGGGCCGGGCCGGGCCGGGCTG
GGCTGGGCTGGGCGGCGAGAGCCGCGGCCCGGCCTGGATCTGGGG
CCTGGATCTGGGGCCGCCGCGGAGTCGACGGCGCAGGGCGGGGCG
GCCC

[0185] In some embodiments, the intronic domain that promotes trans-splicing primarily in the brain comprises or consists of sequences from the gene SQSTM1. In some embodiments, the sequences from gene SQSTM1 comprise or consist of:

(SEQ ID NO: 132)
TAAGGCTGGAGTGGGAGTGCAGGTCGACCGCAGCCGGGGCGGGGG
GCGGGCGGCGGGGGCGGCGCTCCGGGACCCCGGTACCCTTCTCAG
CAACATCTCCTCCGCGCGCGGACCCCGACCCCATTCGCACGTTCT
CGGGGCTCTTTCCCGGGCGTGAGGGGCTCTGGGTGGCGCGGGGGA
CTGGGCGGTTGAAGCCGGGAGCGACCGCTGCCTTCGCTGCCGCCC
AGGGCGCTTCCCCGCTCAGGAGCTTCCTCTGGGCCTCTGGACGGA
GGCGCGCAGGGGCCCGGGAGGCGGGAACGATGGGCCTTTCTAGGC
GGTATCAGGGCCGATGCTCGTGGATGCAGAGCAGTGACCAGCCCA
GAACCGTACCGGCTTCCCGGGGCAGGGGCGGCCCGAGAGCGCCGC
TAACGGGAGCAACGGGCCCTGCCCCCGGTGGTGTAGGGGCCACCT
CGCCCCGCCCAGCCCAGCCCGATATTGATGGGGGCCCACGCCTTC
ATTG

[0186] In some embodiments, the intronic domain that promotes trans-splicing primarily in the brain comprises or consists of sequences from the gene TUBB2B. In some embodiments, the sequences from gene TUBB2B comprise or consist of:

(SEQ ID NO: 133)
GTGAGTGCCTGGTGTGGCTGAGAGCATGAGGGATTCATTTTACGC
TGGGCAGTGGAGGCTGAAGAGGTGTGATTGCCAGAGGGAAAGCAT
GAAGAACATCCGCGGTGTGCCAACTTAGCTTTAATATAGTGTAAA
ATTGTTTGCCTTTCAGCTGCTAAGAGCTTGGTGTCCTGGCCTTCC
TTATTTATAATTATATTCATGAACAAATATTTTAACGTTTGGCCA
TTTTGGTGATAATCTGAAATAGTCTTATCTGAGCATTGACTCACT
GATCTATATTGAGGGGTTTGAGGTAAGGTATTTAGTACAATCACC
GGTGACTTAAGATTTCTCTTTCCCTCTGGCAGGCCAGAGTGGAGC
CGGGAATAACTGGGCCAAGGGCCACTACACAGAGGGAGCCGAGCT
GGTCGACTCGGTCCTGGATGTGGTGAGGAAGGAGTCAGAGAGCTG
TGACTGTCTCCAGGGCTTCCAGCTGACCCACTCTCTGGGGGGCGG
CACG

[0187] In some embodiments, the intronic domain that promotes trans-splicing primarily in the brain comprises or consists of sequences from the gene TUBB2B. In some embodiments, the sequences from gene TUBB2B comprise or consist of:

(SEQ ID NO: 134)
GAAATGTTGGGTTGTCGGAACTGAGTCGGGGACATTTCATTGTGA
GCCTTGGCGTTTCTGGGGGCATCGTTCATGGCTAAATGCAGCCTT
TCTGTCTCAGTTTTGGGAGGTCATCAGTGATGAGCATGGGATTGA
CCCCACTGGCAGTTACCATGGAGACAGTGATTTGCAGCTGGAGAG
AATCAATGTTTACTACAATGAAGCCACTGGTAATCACCCTTGCCC
CACCCCCACTCCCTTCAGTTTTTCCACCTTCTCCCCTTTCCCTTG
CGTGGGACCCCAGGGGTGTGGCCCTGGGAGAGGGTGGACTATTCA
GTTTAGGATCCCCGCTCTTTCCCTGCAGTATTTCATTGGGCTTCC
TTATGCCAACAGAGCCCTTTGAGAACCTGATGGTGGGTCTCCCTT
TGTTTGGGGCAACATCTGCATGATGGCAGCAGGCGCCAAGCCCTT
CTCTGCAGAGGTCCTTGCCTGAGGGTCTAAGTCACTGTTGTTCCT
TGCA

[0188] In some embodiments, the intronic domain that promotes trans-splicing primarily in the brain comprises or consists of sequences from the gene GABBR1. In some embodiments, the sequences from gene GABBR1 comprise or consist of:

(SEQ ID NO: 135)
GTGTGTGGGATGTGGGCAAAGGAGGGCAGGGATGCACAAAGGCAG
GAGGGAAGGCAGGGGTAGAGGGCTTGGAGGGAGAGGGGTCTTTGG
AAGAGGAGGTAGAGAGCTTGTCAACCCAGTTTGAACACCCTACTC
TTTGTTATTGCACTAATCTTTTCTGAGAATAGGGGAGAGTTGCTC
TTTTGCTATGAGGAGCTTAGGGCCCAAAGCACAGAAAGCACAGAT
GAAGAACTTGTGTTCAGCAGAGGAACAAGTGGGGGTAACCCCACC
TCCAGACTTGACATTATCTTTTAGATCCCCCTTGGCCTTATTAGC
ATTGTTCGATTCATGGTCACAAATTGCAAACCTACCCTCTGCCTG
GAAAGCCACCTTCCCACCTGTAGGGTAAGGGTGAGGCATGTGTGG
CCCAGACTGGCCTATTTCTAGATATTCAACAAGCCCTTGCCTGAC
TGACAGCAGCTTGCCACCATTGCTTTCCTGTGTGAATCCCAGGAA
AAAG

[0189] In some embodiments, the intronic domain that promotes trans-splicing primarily in the brain comprises or consists of sequences from the gene GABBR1. In some embodiments, the sequences from gene GABBR1 comprise or consist of:

(SEQ ID NO: 136)
GTATGCCACAGTGGGCCTGCTGGTGGGCATGGATGTCCTCACTCT
CGCCATCTGGCAGATCGTGGACCCTCTGCACCGGACCATTGAGGT
ACCACTGGAGAGGAGGTGCTATGGTCAGGAGAATGAGCAGGGCTC
AGTGGCCATCAGGGCCCTGGGGCTGTGTGTGTCTTGAGGGATGAA
GCTACTTGGAGAGAGTGCCTTCCTCGTATTGGAAGCTCTTCCTTT
CCTTCCTAGAAGGAGCCCCTCATAGGCCTCCAGATTCAGCTGAAG
AAAGGAAGGGGTGGGAATCTGGGAAGGGTGTGTAGAACTTCCAGG
CATCAGGGAAAGTGGGGAACAAGCACCTCCAAGGGTTCAGGAAAA
CATTCTTAGGCCTAGAATGAGATTTGGCATCAGCATTGAGGGTCT
CATAGGAAAACAGTTGGAAGCCAGAGACTGAGAAGCGTTGAGGAG
AGGAGGGGAGGCTGGCAACCATCTTTCTTGTGACCTTGTTTCTGC
CCTA

[0190] In some embodiments, the intronic domain that promotes trans-splicing primarily in the brain comprises or consists of sequences from the gene RPP21. In some embodiments, the sequences from gene RPP21 comprise or consist of:

(SEQ ID NO: 137)
TTGAGGAAGACAAAAGCACTGAAAATTCATAAAGGGACCCTGGGC
ATGGATTGCTGGGGTTGTGTTTAGAAACCGATGAGTTTGTGAGGC
CTCCGGGAGGCTCCCGAGGGCGCGGGGACTACGTTTCCCAGGAGG
CCTCGCGCGGACGCCCGGGCGGGGCTGTGCGAGGGGTGGGGCTGC
GGGAGGCCCTGGAGCGCGGCGGTGATGGCGGGGCCGGTGAAGGAC
CGCGAGGCCTTCCAGAGGCTCAACTTCCTGTACCAGGTGAGTCTG
CGACAAGGGCCCCACGGGGACGGTGCTCGGCGTCCCAGAGTGACT
GCTCCCCTCCCGCAGGCCGCCCATTGTGTCCTTGCCCAGGACCCC
GAGAACCAGGCGCTGGCGAGGTTTTACTGCTACACTGAGAGGACC
ATTGCGAAGCGGCTCGTCTTGCGGCGGTGAGACAGCCACGGGGCG
GGCGGCGGGCGGGACGCGGGAGGAACGCGAGAGGGAGCGCGGGCG
CCAG

[0191] In some embodiments, the intronic domain that promotes trans-splicing primarily in the brain comprises or consists of sequences from the gene RPP21. In some embodiments, the sequences from gene RPP21 comprise or consist of:

(SEQ ID NO: 138)
GATCCCTCGGTGAAGAGGACTCTCTGTCGAGGCTGCTCTTCCCTC
CTCGTCCCGGGCCTCACCTGCACCCAGCGCCAGAGACGTGAGTGC
TCCAACGGAGGTGGAAGACTGCGGAGCATTGGGGGCGCGGAGGGG
GGCGGGGTGGGGGGCGGGCACTGGAGGCCAACAGCGCCTTTCTCA
CTGTAGATGGATGTTGGGTGTGGGATTCGCAGGAGTCTTCCTTCT
TCGGGTTTGGATTAAGTTCCTAACGCCACTTGCACAAACTAGGGT
TTGGGCTCGGCTGTTTTTTTTTTTTTTCTTCCAGTGTGGGCAATA
AATAATAACTTTTAAGAGGCAACCCCACCCATGCACAATAATAGA
TGTTGTTCGGCTTTGTGGAGGACGATTCCCATCACCATTCATTTA
TTAAGCAAATACTTATTTTCTAAAATGTGTCAGGTACTGTGCTAG
ATTCATTATTCTCATTGAAATTACGGTCTGATGGGACAGACTAAG
AAAC

[0192] In some embodiments, the intronic domain that promotes trans-splicing primarily in the brain comprises or consists of sequences from the gene TCF19. In some embodiments, the sequences from gene TCF19 comprise or consist of:

(SEQ ID NO: 139)
GGAAAACTTGTGAACTAATCAGAAAAAGTGGAAGGCGGGAGATCT
TGGGGCGCTGTCCAATGGCGCGGAAGAGAACACATGAGCTGGCCA
ATCGGGAACGGCACGGGGGCGGGCTCGCTCGGCGCGAAGTTCGGG
CCCGGGAATTCCGAAGGAGGGGTAGGCGCTGCCCGCGCGCAGAGG
CCGCGCCCCTCCTGGCCCCGGCTTCTTGGCTGTCAAACAGATGCA
GCAACGTCGGCTCCTGCCGAGGAGCCCAAGGGGTCCCGGGATCCG
CCGCACAGGCTGGCACTGCTTGAAGAGGAGGCTACTCGGAGACTG
CGCCGCGCGGGTAGATCCGAAACGGGGCTGGGGCGGAGTGGGAAA
AGGCCGGGTATGCCTTGCATGATCGCGGGGAGCTCCTTCCTGTTT
TTATCCCACCTAGAGAAGCCGGGAAGTAGGGGTTTAGGTCCAATT
TGTTGGAGTACTTAAGGACTCGTTTGCACTTTCTTTTGGGGGATG
ACAG

[0193] In some embodiments, the intronic domain that promotes trans-splicing primarily in the brain comprises or consists of sequences from the gene TCF19. In some embodiments, the sequences from gene TCF19 comprise or consist of:

(SEQ ID NO: 140)
TTGGAGGCTCCCCAAATATTTTGCGATCTGAGGATCCAGCTCAAG
TGAGGTGCCATAGGACGTGTTCCTGAGTTTGCATTGCACGGAGAC
CTTCCTGGAATTTTTCATTTGCAAGTCGGCTTAACCAATTTTGCA
TTGAGTCCTAGGCTGCTTGCACTCTGAATTTGGGCTATTCAGGTA
GTGTGCTCAAAGTTGAAACCGCATACAGCACAACTCAAGTTTGCA
TCAGACTGGGAAGCGAACTTAAGCCAGCGGTGCGTGGCCCAGGAG
TGGGAAAGGAAATGGATGCCTGAAGTGGAAGAGGTGGTGCAGAGG
GGGCACCGCCCATGCTGCCCTGCTTCCAACTGCTGCGCATAGGGG
GCGGCAGGGGCGGTGATCTCTACACCTTCCACCCCCCCGCCGGGG
CTGGCTGCACCTATCGCTTGGGCCACAGGGCCGACCTGTGTGATG
TGGCCCTGCGGCCCCAGCAGGAGCCTGGCCTCATCTCTGGGATCC
ACGC

[0194] In some embodiments, the intronic domain that promotes trans-splicing primarily in the brain comprises or consists of sequences from the gene ITPR3. In some embodiments, the sequences from gene ITPR3 comprise or consist of:

(SEQ ID NO: 141)
GCGCCGCTGCCCTGCTGGCCCACTCGCTGGCTGCACGTTCCTTCC
TCAGCAAGCGATTTCCTCAGGCACATGTGCTGTGCCAGGCACTGT
TTTGGGGCCTAGGGTCCAGTAGGGCACCAGACAGCAGGGCCGGGT
TCATGGGAATGGGACCTGGCCCGGTGCTCACAAGGGCCTTGCACT
GGGTTAGATGCTCTGCTGCTGAGCAAGGGTCCTGCTCTTTCATTC
TGCACTGGGCCCTACAAGTTATGTAGCCAATCCTTCCACACAAAC
AAGGTCCCTGCCCTCGTGGAGGTTTCGCTCTGGTGGGAAACAGCC
CACAAGCTAAATAACTATGTAATGTAAGCCACTCTTCTGCCCAGC
GATGCTTCCTTTCCTGGACCTCTGCCTTTCTAGGGTATTGGGTCC
TTACCTCGGGGTTTGGGGGCAGCGTTCCAGAGCAGAGCTGGGCCC
TTGGCCCACCTGTGACTCTCTGTGACCCCCAGCCTGTCTGCCCCC
CCAG

[0195] In some embodiments, the intronic domain that promotes trans-splicing primarily in the brain comprises or consists of sequences from the gene ITPR3. In some embodiments, the sequences from gene ITPR3 comprise or consist of:

(SEQ ID NO: 142)
TGGGCCCGAACCCCCTCCCCGGCCGGCGCCTGCTCCTCCCTCCTC
CCTTGCCTGGGTAGAAACTCTGCTGGTTGTGTGAACTATTCCTGC
ACCTGTTGGTAACTGCCACCCTGAATAGCACTGGGTGGCTCAGCA
CTGGGAGGCCCTAGCCTCCCTAGCCCTTCTCTGGGATCCCCTAAA
ATTTGGCCCACTCTGGCAACAATGGGAATGACTCCTTGTACCACT
AGAGGCCCCCAAGACCTTCTCCAGTGACAAAGTCAGAACCTGTAT
TGAACCAGTTGTTAAATATTTTGAATATCACCTCGGCCCTTGCGC
TTCCTCACCCTGTCCGTCTGAACCCCCATCTAGCCTTCCCGGACC
CCAGGGTGATGCCCTGGGGCTTTCCCTCCTTGGGGAGCTGGGAGT
CCATCCCACCCATCTCTAAGCCTTGGGAGGGAGCTAGTTCCAGGG
TGGCGGTGCTGCCAGCTGGGGAAGGGGAAGGGTGGGCTCTGTCCT
TAGA

[0196] In some embodiments, the intronic domain that promotes trans-splicing primarily in the brain comprises or consists of sequences from the gene HMGA1. In some embodiments, the sequences from gene HMGA1 comprise or consist of:

(SEQ ID NO: 143)
CCTGCAACGGCCGGGCGCAGACACTTGCAGAGTCACCCTCGGGCC
GGGTCTGGAGCCTGATGCCTCGGGGGTTTAGCCCTAGCCGCTAGG
CGGGTAGGCAAAGTGTCGGGTTGAAAGGGTCTCCGGGAACCTACT
TCTTCCTGCTCGCCAACTTGCTGTGTGACCTTAGGCAACTCAAGG
CTTCTCTGGGCTACTTTTTTACGGGGGACGGGGAAGAAAACAAGG
GAACCCCCAAGATAATTTCCTAGGGCCTTTCCTGCAGAGTCCTTA
AGTATTTGAGGAGCACAGTTTGCATGCACAGTGTATGGAGGAGAC
AGGCTTGAGGCCCAAGCGGGCTTATTACAAAGTGAGGGATTGGGG
TTAGGCCCTAAATGTAGTTCCTCCAAGACAGGCCTCTGATGTTCA
GAAACAGGTGGAAAAGACGAACGTTTCTTGGCCTCACTGGAAAGG
GCCTCGGGCCTTCATTTAGTTCGTGGGGGGTTGGCTGAGGGGATT
AAAG

[0197] In some embodiments, the intronic domain that promotes trans-splicing primarily in the brain comprises or consists of sequences from the gene HMGA1. In some embodiments, the sequences from gene HMGA1 comprise or consist of:

(SEQ ID NO: 144)
TCAGCACTCGTTTAGTTGATTAATTTTGATGTTTAGTTTGAAGGG
GGACCTGTGGTGTAATATAAGATTCTAATCACTGCCTGTAATTGC
AGAGCAGGCCAAGCCACTAATGACGGAGCAGGATAAATCACCAAC
CACCTTGTTTAAAAGGGTCTCCAAGTCTGAAACATTATAAGATAG
AATAATTACCAAAGTCCTGCTGTCTGGAGGGTCTCTTGATGCTTG
AAAATGGAGGTCCTGGGCCCTCTAGAAATCACAAGTTTGCAAAAA
TGTTTTTTTCCTCTCATTGGGGTAAAAACTCTTTTTCTTCTTTTT
TTTTTTTCTTTTAAATTAGACATGGGAGTCCCACCGTATTGTCCA
GGCTGGTCTCGAACTCCTGACCTCAAGCAGTCCTCCTGCTTTGGC
ATCCCAAAGTGCTGGGATTACAGGCATGAGTCACCTCACCTGGCC
CATAAATCATTTTCAAATGGTCTAGTTCTTATTTTGGTTAGAGTG
AAGA

[0198] In some embodiments, the intronic domain that promotes trans-splicing primarily in the brain comprises or consists of sequences from the gene KLC4. In some embodiments, the sequences from gene KLC4 comprise or consist of:

(SEQ ID NO: 145)
TTTGGCTTTCATTTTTCCTCTTTACAGGGTACCTCTCCTCCCTGT
TGGGCCTCCCAGATACACCCCAACAGGGTGCTTCTTTATGTGCCA
GAACTCTCACTTTTCCCATACCTAAGCATTTGCTCATCCCTTGGG
ATCCTTGTTCCTCTAATCTCTCTTCTGGGGAGTGCTCTCTCCCTC
TCTTCCCCCTGCCCCCTTGCTTCTTATAACTTGTGGCCTCCTCTT
GGGATGGCAGTGCCCTGCATTCTGGTATGAGTATGTCAGTGAAGC
CCCCTTACTGTCCACGCCAGGCTTCCTGTCTCCTCATGGAGGTCT
CCAATCCTTAAATGTACTCAGTCCTTCCAAAGGGAAGGAGGGAAG
GAGAAGGCTTGCGGGTTCAGGGTAACTCCTGTCACTTTTGTCTTC
TTCCAGTGACCAGAATAAGTATAAGGAAGCTGCCCACCTGCTGAA
TGATGCCCTTAGCATCCGGGAGAGCACCTTGGGACCTGACCATCC
TGCT

[0199] In some embodiments, the intronic domain that promotes trans-splicing primarily in the brain comprises or consists of sequences from the gene KLC4. In some embodiments, the sequences from gene KLC4 comprise or consist of:

(SEQ ID NO: 146)
AGTAATTTGTAAGGACAATATATACAATGTAATATAATAAGGTAA
AAATACAAAACAACAGTAGTTGTATTGAGTACAACTTTGTTAAAA
GAAATAGCAAAGTGGCCTGGGCACAGTGGCTCACGAGTGTAATCC
CAGCACTAATCCCAGCACTTTGGGAGGCTGAGGAGGGTGGATCAC
GAGGTCAGGAGATCGAGACCATCCTGGCTAACATGGTGAAACCCC
ATCTCTACTAAAAAAAATACAAAAAATGCCGGGCGTGGTGGCGGG
CGCCTGTAGTCCTAGCTACTCGGGAGGCTAAGGCAGGAGAATGGC
GTGAACCCGGGAGGCGGAGCTTGCAGTGAGCTGAGATCGTGCCAT
TGCACTCCAGCCAGGGTGACAGAGCGAGACTCCGTCTCAAAAAAA
AAAAAAAAAAATGAAAATATAGGTGGACAGGCCGGGCGCGGTGGC
TCACGCCTGTAATCCCAGCACTTTGGGAGGCCGAGGCGGGCGGAT
CACG

[0200] In some embodiments, the intronic domain that promotes trans-splicing primarily in the brain comprises or consists of sequences from the gene DBNL. In some embodiments, the sequences from gene DBNL comprise or consist of:

(SEQ ID NO: 147)
AGTGAGCTCATGCAGCATCCACTCTCCTTGGTGCCCATTACAGAT
GGTCACACTGAGGCTCGGGTAAGTTAAGCCACAAGGCTAATGATC
GACTGGCTCTGGTGCCCGTCTTTGGCCATGTGCCTAAAACTCAGT
CCTGGGCAGGGGATTAGGCTGAAGTGGCAGCATAGGGCTGAGCGG
GCAGTGGCTCTCCCTGCAGAAGGAGGAGGAGAACCGTCGGCTGGA
GGAAAAGCGGCGGGCCGAGGAGGCACAGCGGCAGCTGGAGCAGGA
GCGCCGGGAGCGTGAGCTGCGTGAGGCTGCACGCCGGGAGCAGCG
CTATCAGGAGCAGGGTGGCGAGGCCAGCCCCCAGAGGTGAGCCAG
AGGTGGAGGCTGGCCTGGGGGACCCACCCTGAGGCATTGCTGGGC
ACCTGCTCCATCCCATGGAGGCGAGGAGGACTAAGGGGTGTGGCA
TGAGAAGCTGTGACTGTGCCTCAGCTGTGCCCCACCCGGCCCTTC
CCAG

[0201] In some embodiments, the intronic domain that promotes trans-splicing primarily in the brain comprises or consists of sequences from the gene DBNL. In some embodiments, the sequences from gene DBNL comprise or consist of:

(SEQ ID NO: 148)
ACGTGGGAGCAGCAGCAAGAAGTGGTTTCAAGGAACCGAAATGAG
CAGGTAAGATGGGGGTGCTCTACTTGTTTGGACCTGTCCTGGCCA
CACGCAGAAGTCCCTGATCTCGGATTGAGGGCCCAGCCCAGACCT
GGGCAGAGGCTGCCCTGCAGTCAGCTGGGGCAGGTTGGAATCTGG
GCACCTCAAGAGGTGGCAGTAGAGAGGAAAGCCAAAGGCGGAAGC
GTCGGGCTTGGACCACACCTGGTCCTGGGGGAGGCCCTGGGAGCC
CCTTGGCTTCTGTGTTTTACTTCCTTTTTTAACGTTACTTTTTAT
TTTTAAATGACTTCTCTCCTGAGAACATGTTTTGCCTCCTGGCCC
CACACTCACCTTTGAGGGGCTACTGGGCCGACAGCTGGAGGGGCT
GTGATCTGGGGAGAGGTGGTGAAGGTTTTGCCCACTGCAGGGGTC
AACATGTGCTTCCCTCCAGGAGTCTGCCGTGCACCCGAGGGAGAT
TTTC

[0202] In some embodiments, the intronic domain that promotes trans-splicing primarily in the brain comprises or consists of sequences from the gene POLD2. In some embodiments, the sequences from gene POLD2 comprise or consist of:

(SEQ ID NO: 149)
GGTGAGACATCGGTATCCAGGCACGATAAATTTCCAAGTGGACAC
AATGTCTGGTGTCAACTACAGCTGTTCTCCTTCTTTTCCCAGTAT
CCTTTGGGTGCAGTGAGACACCAGGAGAGCTGCTGCTTTGGGGGA
TGGACAGGGGCAGCAGGAATGCCTTTGTGTTTTCGCAGTGAACCT
CCTTGGCCTGGGCGAAGCTGTGTGGACCAAGCAAGTCAGGAGTGT
GGCCATGTTTTCTGAGCAGGCTGCCCAGAGGGCCCACACTCTACT
GTCCCCACCATCAGCCAACAATGCCACCTTTGCCCGGGTGCCAGT
GGCAACCTACACCAACTCCTCACAACCCTTCCGGCTAGGAGAGCG
CAGCTTTAGCCGGCAGTATGCCCACATTTATGCCACCCGCCTCAT
CCAAATGAGACCCTTCCTGGAGAACCGGGCCCAGCAGCACTGGGG
TAAGTGAGAGTTTGGGAAGGTGCTTCCCCCACAGCATCCCTGAAC
TTAG

[0203] In some embodiments, the intronic domain that promotes trans-splicing primarily in the brain comprises or consists of sequences from the gene POLD2. In some embodiments, the sequences from gene POLD2 comprise or consist of:

(SEQ ID NO: 150)
TCAGCTCTCCTGGAGCTTATGGTCTAGTTGGAGCAGGCAGACAAT
ACATTTAAAATATACAGTTTGTTAGAAGGTAAATGTTGTAAACAA
CAATAACAGTTGAAGTACTGGGGAGAGTTGCAGTTGTAAATCAGA
TGGGCAGGGCACAAGGTAACATTTGAGTAAAGATGTAAGAACTTG
AAGGAGATGGGCAAGTGAGCTCTATAAGTATACGGGAGAGGGGCA
AGCAAGAGTTCAGAGGCCCCTTGCTGTGGGGAGGGATCCAAGGTG
GAGGAGTGGGAACCAGGAGGGGAGAGGACCAGTGGAGCAGATCTC
ATAGGCAGTTGTAAGGACTTGGGGCCTTATTCAATGAAATGAGGA
CACTTTGGAGAGTTTTGAACAGAGCAGTGACTGATTTATGTTTTG
GTTTTGGTTTAGTTCTATTATTATTTAATAATAGGCTTATTATTT
CACAGAAGTTTTATTTAATAAGGCAGACCTCTTGTCTGGAAATGA
GACA

[0204] In some embodiments, the intronic domain that promotes trans-splicing primarily in the brain comprises or consists of sequences from the gene OGDH. In some embodiments, the sequences from gene OGDH comprise or consist of:

(SEQ ID NO: 151)
TCTTTAAATTTGATTTATTTTAAATTGAGGTGGGATCTCACTGTG
TTGCCCAGGTTGGCCTCAAACTCCTAGGCTCAAGAGATCCTCCTA
CCTCAGCCTCCCAAGTAGCTGGAACTACAGGCATGTGCCACTGTA
CCCAGCACCTTAGGGAAATGTTTATGTTCTGAGCTGAGGCAGGCT
TCACATTGGAGTAAGAATTGCCCAGCATATCTCATTTCTGTTTAT
CCATGGAAACTGTATAAAGATCACAAGAAATGGATCCTTTCAGAC
TCCTAAGTTTATCATAACCTGAGTTTATCTCTTTTTTATAAAAGT
ACATTTATGCACAATAGTGCTTTTAAAATAAGTTATTCCAAGACT
TTTAAAAACTAATTTTGTCGTATGGGTTTATTGGTGCTGTGTTCC
TCTTTGGAAAAGGTTTGCATAACCTGTGACTCTTTTAACCCTCCC
CACAGCTCACTGGATCTGCTTAATGACTTGCTTGTGTTATTGCTT
CCAG

[0205] In some embodiments, the intronic domain that promotes trans-splicing primarily in the brain comprises or consists of sequences from the gene OGDH. In some embodiments, the sequences from gene OGDH comprise or consist of:

(SEQ ID NO: 152)
TGAGAATTAAGCTGTAAATGCTAATTTTAATGTAATTTTACTTTT
TTTTTACCCCTTCCCTCTTTTTTTTTCTTCTGTCCTTTTGTGTGT
GTCCTTCCCTCTCATCGTTGGCCACTCATAGATACGAGGGCACCA
TGTAGCACAGCTGGACCCCCTGGGGATTTTGGATGCTGATCTGGA
CTCCTCCGTGCCCGCTGACATTATCTCATCCACAGACAAACTTGG
TGAGGGTCTGAGAGCAGTCAGCTGCGTTGCTTGAGCTCCTCTCGC
TGTGCCACGACCTGTGGTAGCCAGGATGTCCAGGCAGGAGGGAAA
GGCTCTTAAGTTTCCTTTCATTCTGATCACTTGAAATTTATCGGT
ATTGTAGCCTTAGTGTGTTTTGGGCAAGTTATTTTTATCTTACTT
TTTCAGCCAGATTGTCTTAAGTCTCAAAATTTGAAAATAAAATTT
TGGACAGAAAGGTTTGTGGCACAGGGAAAAAGCTTGTCCACCTGG
GGCA

[0206] In some embodiments, the intronic domain that promotes trans-splicing primarily in the brain comprises or consists of sequences from the gene RFC2. In some embodiments, the sequences from gene RFC2 comprise or consist of:

(SEQ ID NO: 153)
GGCCCTCCAGGAACCGGCAAGACCACAAGCATTCTGTGCTTGGCC
CGGGCCCTGCTGGGCCCAGCACTCAAAGATGCCATGTTGGAACTC
AATGCTTCAAATGACAGGTAGGTCTTAGAGTCAGACCTGTAGGGG
GGCGGGTGCTCTGCATTGAGAATTGTTACAGAAACAACCTTTCTC
AGCATTGGGTTGTATGCGAAGCCTTGCCAGCTATGTGATTTCCTC
CACCCCTTCCCAGTGAAAGAGCGTTGCTCACTTGTCAACTTGCCG
GTTTATTTTTTTTGTTTTCATGGAAATTTTCAAAAACTGTTCTTC
TCAGCCAGGCATGGTGGCTCACACCTGTAATTCCAGCACTTTGGG
AGGCCGAGGCAGGTAGATCACCTGAGGTCAGGAATTCGAGACCAT
CCTAGCCAACATGGTGAAACCCCGTCTCCACTAAAAATACAAAAC
TTAGCTGGGCGTGGTGCTGGGTGCCTGTAATCCCAGCTACTCAGG
AGGT

[0207] In some embodiments, the intronic domain that promotes trans-splicing primarily in the brain comprises or consists of sequences from the gene RFC2. In some embodiments, the sequences from gene RFC2 comprise or consist of:

(SEQ ID NO: 154)
GCCTGTTGAGTGTCTCCATGTCTCATCCCACTGTCCGCTGAACTG
CTTTCTTGTGCACAGCGCTGCCTCCCTGGAGAGCCCCTTCCCATT
CCCCCGGCAAAGGGAAGTGTTTCACTCTAGTTGGGAGGCCTGGGG
TTGGTTGCTGTATTTTTTTTTATTTATTTATTTATTTTTTTTTCT
GAAACGGAGTCTCACTCTGTCACCCAGGCTAGAGTGCAGTGGTGC
AATCTCTGCTCACCGCAACCTCTCCCTCCCAGGTTCAAGCGATTC
TTGTACCTCAGCCTCCCGACTAGCTGGGATTACAGGTGCCTGCCA
TCACGCCCAGCTAAGTTTTGTATTTTTAGTAGAGACGGGGTTTCG
CCATGTTGGCCAGTCTGGTCTTGAACTCCTGACCTCAGGTGATCT
GCCCGCCTTGGCCTCCCAAAGTGCTGGGATTATAGGTGTGAGCCA
CTGTCTCCGGCCAGCTGTATTGATCTGTGTGTGCTGTGGGTGGAA
TGCA

[0208] In some embodiments, the intronic domain that promotes trans-splicing primarily in the brain comprises or consists of sequences from the gene NRCAM. In some embodiments, the sequences from gene NRCAM comprise or consist of:

(SEQ ID NO: 155)
GTAAGAAAGAAAGATTAAAATTGCTTTATAATGCTACATAATAAT
CCATTAAACTAAAAAGATCATGGGGGAAATCATGTAGATTGTAAT
ATTTTGTCTTCCCAGAGCCATGAGTTTGGACTTTCTCTTCAAATG
ACTTTTGATCCCTTTTTATATAATGGCAATCTAAACATTGTCAAT
GATCATAAGGCATTTGGAGGAGTAAATCAATCAGTTCTCTGAAAA
CATTAGTGAGCCTACTTTCTTAGACTCCACATAGGTTATGGATGC
TGAAGTAACACCTAAAACCAACTGGCAAGGAGAGAGTTGCAGGGA
AGGTTCATGGAGTTTTTCAAAGGAAGTAATGCATGAACTAAGTCT
TCATATTGTGATGTGTAACATTGCTTTCCCTATAAGGTAATGGTT
TATTCAATTTAGTGGGCCCATTAAATTTATATTTTCTTTACCTGA
CCATTTTCCCTTCAGTGACAAGAAAAAAAAAATCTGTGAGAGAAT
ACTC

[0209] In some embodiments, the intronic domain that promotes trans-splicing primarily in the brain comprises or consists of sequences from the gene NRCAM. In some embodiments, the sequences from gene NRCAM comprise or consist of:

(SEQ ID NO: 156)
TTAACAGATTTCTAAAAAATACTGAAAATGGCAACAGCCTTGCAA
GGACAGTTTAGCCTCTAAAAGCAGTTCCTTTGAAGAGAAAATACT
CAATTAGATGTATACATTCTGTTCTGTTTAAAACTCAGTTTTGTA
TTTTTCTCATTATACTTAATGTAAAATGTATCCTGTTAACAGTGA
ATACTTTAATTGGTTTGGGAATTTGTTTTTATTGAGAATATATAG
TGAAAATAACTGTGAACACAGTGTTCACCAGGGGTTTTTAGCATT
TAATGTGATGATTATTCAGATTTCTCTACTTGAATTTTTTAATGA
ATGAAGATTTTTCAAAGTTAATTATTCATATAATTCCTGATTAAT
AATTGACAGATCCTAATTTGGGGCCACATGTAAAATATATGAAAG
CTCACATAACGTGGCAATTTTTTACTCTGAGAGACTGCAGCAGTT
CCCATCTCCCCTTAACCTATTGCCACCAACACCATTGATTTGTTT
TCCA

[0210] In some embodiments, the intronic domain that promotes trans-splicing primarily in the brain comprises or consists of sequences from the gene MEST. In some embodiments, the sequences from gene MEST comprise or consist of:

(SEQ ID NO: 157)
TGGTACGTGCCTAGCAGTTTTTTAGAGGTTACCTAATAAAACAAG
CTAGGTTTTGTATCACACAAAAAATTATTTATAGAAAATATTTTC
TTGGGCTGGGTGAGGATGCTCACGTCTGTAATCCTAGCTTTTTGG
GAGGCTGAGGTGGGAGGACTGGTTGAGCCCAGGAGTTTGGCACCA
CTCTGGGCAACATAGTGAGAAAAATTTTTCTCTACAGATAATTTA
AAAGTTAGCCAAGTGTGGTGTTGCACACCTGTATGTAGTCTCAGC
TACTGAGGACACTGAGGTGGGAGGATCGCTTGGGCCAACGAGTTT
GAGGTTACAGTGAGCTATGACTGCACCACTGCACTCCAGCCTGAG
CAAGGGAGAGAGAGACCTTGCCTATTATAATAAAAAAAGGAAGAA
GAAAACATTTCTTTTCGGAGAGGAGTTAATTTTAGGGTGGGAGTA
GAACAGATGTGAGAGCTGTTAAGTATTTCATTCCTTTTCTCTTTT
CTAG

[0211] In some embodiments, the intronic domain that promotes trans-splicing primarily in the brain comprises or consists of sequences from the gene MEST. In some embodiments, the sequences from gene MEST comprise or consist of:

(SEQ ID NO: 158)
TGAGTCTCCCCGAGAGAAGTCTATGTTTTGTTAGTATCTCATCCT
GACAGTGGTAAACAGAATTGCCTGTTGAGGGCTATTGGCTCTAGC
CATTGTCTTTAACCTCGCTGGCTGTTCATCCAGGAAACAATAAAA
AGATTGAGTTGAGGAATCTTATTCTAACATAATTGTAGTATCAAG
ACATTCAGTTATACGTTCTCTTGATTTATACATAGTCTGTTTTCA
CTGTCATGACTGCTACATATTCCTTGGTGTACAAAAAGCTCTCAT
GTGAGTCAAAGGTTGAAAGTGGATATACCTACAAAGTGTTTGTTT
GTTTTAGTCTGATTGTAAAGCCAATTCATTGGTTTAGGCTGAGCA
GATGGCAAGGAGAGATTGAGAAGAGCTCATTGTGGAAAAGTGCCT
TCTCATTGGTTGCTATTCTCTCTAGGTACTTACTTGGAAGGTATC
AGAATATGAAATCTTGATTATGTCACATAAGAATGTTCCATACCT
TCCT

[0212] In some embodiments, the intronic domain that promotes trans-splicing primarily in the brain comprises or consists of sequences from the gene PTN. In some embodiments, the sequences from gene PTN comprise or consist of:

(SEQ ID NO: 159)
GTAAGTGAGAGGAACGTACGATTTCTCGGAGGGCTCTTCGATCGA
GTTTGCCTTCACCCTGTGCCACTTTTCTGGGTGCCAGCAGATGAT
GGTGGTAGGGGTGAGAGAGGCTGCCTGGTGTCTTTGCTGATAGGA
CTGCTTTCAAAACTGACTTGCTCCAGAGGCCAAGGGAGGCATATT
TTTGGGGTTTCAGGTTAGGTTAGTTCGGGTGTGCTTAGGTAAGTG
AAAGGAAAGAAGTTTTTGTGATGTTAAGCATGTATTTGGACCGTG
TTCCAGCTACCAGCTGGAGAGCAAGACAGGGTGGGCTGGAGAGTG
CATCTTTGCTTTTTGTAAAACCTGGAGCTTTAGTAGGTGTGTCTC
TGGCTGGGTAGGTGCAAAGAAAGTAAGGCAGCCTGAACAAGCAGC
TCTCATTTTCCCAGCCTCTCTCTGATTCTCTGATTGCCCCAGAGC
CTGTCAGCCCATGACTCTTAGCTGGCATTTCTAGGTAAGCTGTGG
GGGC

[0213] In some embodiments, the intronic domain that promotes trans-splicing primarily in the brain comprises or consists of sequences from the gene PTN. In some embodiments, the sequences from gene PTN comprise or consist of:

(SEQ ID NO: 160)
AAGGCACCAAGGAAACCAAAAAAGGAAAGAGCTCTCCCTAAAGGT
AAGTAGCACTTAATTGGGAACTTTGAGACGTCTGTCACTCTTTGT
GACAATTGAGAAAAAGTACTTTGTACATTTTGTGCTTTGCAGGTG
AGATGTGACTGACACCTTACTGTCTCTGTGTTTAGAGAGGGCTTT
CGTGGGTGGAAGAAGAGGCTGGTTTGAAGAGAGTGCTTTTCCATT
CTGAATATCATTAAAGGATTGTGGGGGGCCAAAAATGTAACCTAA
AATGCCATCAATTGTCCATTTAAAATATCCTATTTGGCAAAGTGG
CTTTGCACTCATCTGAAGAATAGATCATGGGTGGAGTTTGGAAAA
GAAATGTTGTGTTTCGTCTCTGCTAAAAACAAAACAAGGTACCAT
CTCATGGCCTCTTGGTTCAAATCCGTTTTCTTGCTCCGCAGGGAG
AGACTGCCCCTGGAGTATTCTGCTTTTAATAAGCTTCCCAATCAG
CTCT

[0214] In some embodiments, the intronic domain that promotes trans-splicing primarily in the brain comprises or consists of sequences from the gene SSBP1. In some embodiments, the sequences from gene SSBP1 comprise or consist of:

(SEQ ID NO: 161)
TTAGAAACCTCATCACATAATTTCATTTCTTTCCAAACTTGAAAC
CTTCTAAACTTGAAACCTTCTAAACTTGAAACCTTCCAAACTCAC
CACTTGGCGGCGTTGATCCATCCGCCCGCGCACAAAGAGAAGATC
GCGGAACTTCAGAGTTAAGGGGAGCCGTTTCCCGCAGCGCTAGCC
GGCAGTATTTCCAAGGCGCAAGTTGCGGAGTTTCTGTTTCCTTTT
TCCTCTGGCGAGCTTTGCGTTCCCTGTGCGCCGGAAGTGATCCCC
TGCGTGGCTGGGCTGCTCGGGTTAGATCGTCAGGTGAGGGAGGAA
GGGATAGCCAGCGCGAAGGAAGTGCTGGAGTCGTGTGTTTTGGCT
GCGCGTGATCCTGCGTGGGTCGGGAGGTGTTTCTGTGTAGGTGTC
TGGCCCTTTCATCAGTCGTGCGGAGGACCGCGTGATTTCCTTCCA
GTTCTCCTCGGTTTTCAGGTGGTGGCGCCATCTTCGGTAAAGGGT
GTCC

[0215] In some embodiments, the intronic domain that promotes trans-splicing primarily in the brain comprises or consists of sequences from the gene SSBP1. In some embodiments, the sequences from gene SSBP1 comprise or consist of:

(SEQ ID NO: 162)
TACGTTGTGGTCACAAAATTGGAGTGCATAAAAATTATGAATATA
GTTAGGAATTTAGGACTGGTGAGTTGTACTTTTGCCATAAGAGGT
AATGTTTTTTTCTTATTTTGTTTTTTTCCTTCAGGAAAAGCCTAA
AGATTAGACTGTAAGAAAAGAAAATAGAAGCCATGTTTCGAAGAC
CTGTATTACAGGTAGTCACTTGTCTGTATTAATACTGAGATGTAT
TACTATCAGCCACAGTGATCAGAAGACTTCTTTAGGCTTTTAACT
ACAGGGGCAAAAGACCTTTGAGCTCACCCACCCACCTCTATACTC
ATTTGATATGGAGGATTGGGGACGATTTTGCCAGTGTAAATTATG
TTCACTAAAACAAAAAAAAAGTTCAGGTTTATTCACACGTAATAG
GAATCATTAATTTTTAAAATGTGTGTGTGTTGCTTGAATTTAACC
AGTGAGAGGACATTAAAGGTCTTTAGTGACCTAAAGACTGTAGGA
ATCA

[0216] In some embodiments, the intronic domain that promotes trans-splicing primarily in the brain comprises or consists of sequences from the gene CNTNAP2. In some embodiments, the sequences from gene CNTNAP2 comprise or consist of:

(SEQ ID NO: 163)
ATTTCCCTAAAATATCAGTTTCATAAATTGCAAACATATGACCAT
AGTCCCCACTGAGACCAGAGTAATATGTTAATTAATGTTGGCATT
GACCACCCAGAATAGGACAGAGCATCTCTCTCCCTGACTTATGTT
CGGCCAGCAGTAGCTTTGCTGTCTTCAGAAAGTCTAGTGATCCAC
AGTCACACCCACAACACACATACACACTTTACAACTCATGGTCAG
CCTATCACATCAGGCTGTCTGGCTGTCAATCCCATGGTGGAAGCT
GCTTGTTATAGTTAGACAGCCAACTGCTGCTCAGTAGTAGGTCTT
ACACTCCAAGTAGATCCGTAGTGGTGCATCCAGTCACTGAATCCA
TGCTCTGCTGCTGTGTGTGAGTTTAGCTTAGGCTCAGGCTGTGCT
TCAAAACTTGTAGAACTATACTTTCATCAGTGGTCTGACATGGAT
GTTCATTTTATTCTGTGTTTTCCTCAGAGCCTGTCTTTCTATTTT
ACAG

[0217] In some embodiments, the intronic domain that promotes trans-splicing primarily in the brain comprises or consists of sequences from the gene CNTNAP2. In some embodiments, the sequences from gene CNTNAP2 comprise or consist of:

(SEQ ID NO: 164)
TCAGTGAAACCTATTTGACATTTGTTCCTGAAACTTATTGCAATT
TCCAGAGTTAATGTTGTGCTTTGTTTGGTTTTGCTGGTGTTACAC
GCTCAGGATTAGGTTTTAATTCAGATCTTCAAGACGCTTACTTGG
TTGTAGTGTGTGCTGATTGAATAAAGAAAACTTGGAAAGTTGTTG
AGAGAGCAAGGCATGGGTGAAGGAGAAAATTGGTTGAGATTGGAA
AAGCAAAATCTATTCCTTACCAATGCTAGTTTATTTTTAATAGAT
AAATTGCTCTTCTTTTAAGTGAATAATTTATGTTTAAAAACAAGG
AATGTTTATTTTAAAAACACAATTGTATCTGGTATCTTTTCTCTT
TATCAACATTCGTGTACCTTTTACTATTAGTAACAAGATTATACT
AATTTTAACTTTAAGGAATATTCCACTGCTGGAATCAGAACTTCA
AAATGATCTTGCTAAAATTATGCAAATGGTTGGAAAAGAAAACGA
AAGT

[0218] In some embodiments, the intronic domain that promotes trans-splicing primarily in the brain comprises or consists of sequences from the gene PTPRN2. In some embodiments, the sequences from gene PTPRN2 comprise or consist of:

(SEQ ID NO: 165)
GTATGACGCGCGGCCCGCCGGCAGGGCAGTGCGCGCTGAGCGCGC
GGCACAGGGGAGCGAGGCTTCGGTGCTCCTGAGACGCCCCTGGCG
CCGAGGGCCGCGTCTGTGTCGGCGCCGCAGGGGGGAGGGGAAGGG
AAGCGAGAGGCGGGAAGACTCCGTTAACGGCACGTGTTAATCGTG
AGCGATTTTCTAGCTTCAGAGGTATTAAAATGTGAGGGGGAATAG
GCATCTTCGAACTGTGGAAATAGGGCCATTATTTTTGATAAGGTT
CTTCAGTTGACAAAGAGCCTAAAGTGTATGTGCCACAGGATATTG
ATGCATAAAGCTCGGATGTTCAGTTGGATTCTCATCTGGCTGCAT
GGGATGAAAGAGGTAGCGAGCGCAGGCCCAGATACCACCCTGCGT
GATCTTGCAGGGAAGCCCGGAGACACTTAGCCCGTGGCTGTCTGT
ATTTTTAGGGCTATTTTGAAACTGACCCTCTTTAAAAAATTCAGT
TTTT

[0219] In some embodiments, the intronic domain that promotes trans-splicing primarily in the brain comprises or consists of sequences from the gene PTPRN2. In some embodiments, the sequences from gene PTPRN2 comprise or consist of:

(SEQ ID NO: 166)
GAAGTGCCTGCGCTGGGGTTCACATCAGCGCGACTCCGTGAGCCT
TTTGCTTTTCCTGCTCTAGACCCGGGTGTGCGCAGCTGCGACGGA
GTCTCACTTAGAGTGGAACCACTGAGCAGAACATGTAGTCGTGTC
GCTGCTTTTGTTGAAAAGTGTAATTTTTCTCTGGTTCCTTTTTTT
GAGGGTTTATGTAACATGGACATGCAAAAGACAGAAAGTAGGATA
GTTTTGGATTGTAACCTTTTAAAAAATTATTTGACGCTCAAGCCC
CTAAATAACACTAAGCACACACACCCGCACGGAGCTAACTTCAGT
GCGTTAACACTGGGAAGGTGGGAGGGGGCCGCGAAGCCGAGGGAA
CCCACCTGCGCTGTAAAATGTGCCCTCTTCGCAGCGCCCCCTTCT
CTGGTCAGACGTGGCCCTGGGTTCCTCAGTGCCTGAGGTTCGGTT
CACAATGTCCACACCTGTCTCTGTCCCCTCCCTCCGCTCCTCCCT
GCCA

[0220] In some embodiments, the intronic domain that promotes trans-splicing primarily in the brain comprises or consists of sequences from the gene FDFT1. In some embodiments, the sequences from gene FDFT1 comprise or consist of:

(SEQ ID NO: 167)
TAGAGAGGGGGCAGCTGAAGCTCCAGGAGTGTGTGGGGCTCCCTG
GGGCTGGATGGCGGTGGCGGGCAGGCGAGCTGGGCTGTGCTCGGG
TGTGTTACAGTAAAGACGCCCAGCTTGGCGCTGGCCCGGCCTTTT
CACGGTTTTAGGCTCTACAGAGAGCGGCTGCAGAGCTCACCCGGC
TGGCAGGAGCCACCGAGGCCGGACACGTGGGCGACTTATTGACCA
AGTGGGGAGGAAGCAGCCCCGCACTGCTCTCCCGACTGCGGACCA
CCGTTGGGCTCCTGCGCATCCTAAGCCCCACCGCCTCACCTCCAG
TCCCCACAGCGTTCGCGCTCCCAGCCGGGGTAAGCGGAAGAAAAC
AAAGGCCCGGCTCCATCAGGGCACCAATCCCGCTCGTCGGCCTCT
TTCTCGGCCTCCAATGAGCTTCTAGAGTGTTATCACGCCAGTCTC
CTTCCGCGACTGATTGGCCGGGGTCTTCCTAGTGTGAGCGGCCCT
GGCC

[0221] In some embodiments, the intronic domain that promotes trans-splicing primarily in the brain comprises or consists of sequences from the gene FDFT1. In some embodiments, the sequences from gene FDFT1 comprise or consist of:

(SEQ ID NO: 168)
TCCAGCCGGCCGGTGAGCGCCTGGGGACCGCAGAGGTGAGAGTCG
CGCCCGGGAGTCCGCCGCCTGCGCCAGGATGGAGTTCGTGAAATG
CCTTGGCCACCCCGAAGAGTTCTACAACCTGGTGCGCTTCCGGAT
CGGGGGCAAGCGGAAGGTGATGCCCAAGATGGACCAGGTGGGCCG
AGCCTCCCTGCTTGCCCGGGGCGGGGAAGGAGCTCGCTGGGCCGG
CCTCAGGGCCTGAGCGGCCGGGCCCGGATCTGGGGCAAGGGGCGC
GGCGAGCAGGGCCGACGCCTGGGTGTTCCCGTCCCCCTTTCCTCG
AGCCTTCCCCCTGTAGGGCCCGGGTGGACGCGGCCGTCCTGGCTG
ACCTGTCCCTGCCCCCGCAAGCCGCCCTGGGCATGAGCGACTTTT
GCGTGGTTCCCGGTGGTTGCGCTCCCCGTTTCGTCCCCTCCGTGA
GCATCGGCGCTTACCGGTATTTTAACCCGAGGGTTACACATCTGA
GGCA

[0222] In some embodiments, the intronic domain that promotes trans-splicing primarily in the brain comprises or consists of sequences from the gene DMTN. In some embodiments, the sequences from gene DMTN comprise or consist of:

(SEQ ID NO: 169)
CATGGTGGGGGACAGTGGGAATGGGGCCTTGAGGAATTGGAAGAG
AGCTGTCCCTTGCTCTGAGTTTTCTCAGGTGGAATGAGAGAGGGT
TTGGGACCAGGTGAAGGTGCTCACAGAGACGGCAGAGGTGTGGGG
CCCGCAGCCGCGTGCCCAGTGCAGCCAGCGCCCAGGGGCCTCTGA
ACCCTGCCGGAGCAACCCCTCTGGCCCTTCAGCACAAGGACTGTC
CCTGCCTTGCTGCCTGTCATTGTCCCGAGCTCCACACTGGGCTTC
CTGGAGTGGGGACTCTCCCCAGTGCTGCATACTCTTCAAGACTGG
CCTGCTCTCCAGCCCTGAATTAGGGTTCTCCTGGGGTCACCCCTA
AAGCCAATTCTAGAGCCTTATGAAAGGAAGTGGGGGGATGGGGTA
CTTGGTGGGGTTCACTGGGCACCCTAGCTCCTGAAGCTGTCCCCT
AACCCCCAGCCCCAGCACTGAGGACCCACCCTCAGGCCCCCTCCC
TCCA

[0223] In some embodiments, the intronic domain that promotes trans-splicing primarily in the brain comprises or consists of sequences from the gene DMTN. In some embodiments, the sequences from gene DMTN comprise or consist of:

(SEQ ID NO: 170)
TACCGAGCACCCTCCCCTCCTTCTCCCCTCCGCCCTTTCCCCTTG
ACTCCCCCTACTCTGCCCTACATGCACTGGCTTCAATAGGAGGAG
GCACCCCTCCTCCCAGGCCCAGCGATTCTACCCATTCCTCATCAC
CCACCTCGTTCCAGGCCCCTGGCCACAGCTGTCCTTCCTGGCATC
AGCTCATTCCAACTCTACCTCTGGGGACCCTTGCACCAGAAGACA
GCTCTCCTGGGGTGGGGCCTGGTGGGGGAGGGGCAATACAGGGGA
GGAACCCAGGTCGGGGTGCGGCGGGGATCAGGAATTCTAAAGGGC
TGAGGTGTCAAAGCCCCAAGTACCTGGTCCGCTGGAGGGACCGAG
AGAGATCATCTAGGGCTGGAGTGGGGCTGGGGCTTCCCCTCTGTC
TCTCAGACTCTGATTAGAGGGAAGTAAGGGTGGGGTTGAAGGTAC
AGAAAGCCGAGAGGCTGGGCTGAGGCCGGGCTGGTTGTGGAGCGA
TGGC

[0224] In some embodiments, the intronic domain that promotes trans-splicing primarily in the brain comprises or consists of sequences from the gene CCAR2. In some embodiments, the sequences from gene CCAR2 comprise or consist of:

(SEQ ID NO: 171)
TTTGAGCCCGGAACCAATGATCCGAAGCCTTCTTTCCTGATGGGA
TTCTTTAGCGAGGACACTACCGAGGCGCGACTTCCTGACGCGCAT
CCGATCCGGGAAGGCGCACTTCCGCTCCCCAGTTGCCGCGGGATG
GCAAGCCGGCGTGGGGGAAGGGAGAGGTCGGCGGAGACGAGGGAG
GGACCATATCCGGGAGAGCGGCAGCTTCCGACCAGTGGTCGCGCT
TCCGGAGAGGCGCTTCCGGTGGCGGCGGCAGCAGCGGCTGTGGTG
GTTCCGGGTGTCTTTGTCCCCCCGGTGTCGCTGCCCTGGCCCGCA
GGTGGGTTGGGGGGCCCCCTGCCGCCCCTCTGCCCCTTCGCCCCT
CCGCCCCTCCGCTGGCCGAGGGGCTGCGAGGGCCGGGCGGCGAAG
ATGCGTGGGGCGCGGAAGGGGCCGAGCCCCTCTTTGGACTGCAAG
TCCCGTCTCCCTGGCAACGGCCTCGGCCTTGGGGGCGGGCGGGAG
GAGG

[0225] In some embodiments, the intronic domain that promotes trans-splicing primarily in the brain comprises or consists of sequences from the gene CCAR2. In some embodiments, the sequences from gene CCAR2 comprise or consist of:

(SEQ ID NO: 172)
TGAGTAGCAGTTTTGTCACTACCTGGTTATGTGGCCCCGGGCAAG
TCTCTTGATCTCTCTGAGCATCAGTTTCCTTGTCTGTAAAACAGC
ATGACAGTATCATGCACCACTAGGTTATTGTCAGGGCAAACTGGA
ACAATGTAATTTCTTGTTTCATTTCTTTCTTCTCTATATTCTCTC
CATCCATTGCTTTCATTCATTCTTATTACCCACCTCCCTGTTTTC
CGAAATATCCTTACTTAAGATTCTCCACTTTTCCGGGTATAGATG
GAAATTTCCCTTATAAGCTGTTAATTTCTTTCTTTTTGGATTGAA
GCCTTTTCCCCACGACTCTGAAAGAGGACAGCGTTCCCAATGTCC
CAGTTTAAGCGCCAGCGGATCAACCCGCTTCCAGGGGGACGCAAC
TTCTCAGGTGATCACTGTTCTCCCTACCTGGCCTCATCCTGGGAA
GTATGTGCTCTGGAGTTAGTTTGGGGTTTCCCTGGTGGAGAGCAA
TTTG

[0226] In some embodiments, the intronic domain that promotes trans-splicing primarily in the brain comprises or consists of sequences from the gene GOLGA7. In some embodiments, the sequences from gene GOLGA7 comprise or consist of:

(SEQ ID NO: 173)
CCTGCTTTCTACTTCTGAACACAATGAGCAGTTTGTGTTTGAGGG
TTTGGGGAGGGGGTGTTGTTTTTTCTTTATGTTTTGTTTTTTGTT
TTGTGTATGAGTTGGGTGGCATAACCCACACGTAAGCTGCGACGT
CCAATCAAGAACGAAAATGACCCCTCACAATCAGTGATCGGGAAC
CACCTGCCACAATCACTAGGGAAGTGACACAGCCGGGAAACTCCG
CCCCTCACACCCCCGCGCGCTCGCGCCGGCCGCAGCCCCACAGCT
CGCCCCGGCCGCAGCCCCACAGCTCGCCCCGCCTCTCTCCTTCCG
GAAACAATCCCCGCGCGGGCGGAAGGCGGGGTCGGCCCTGGCCCC
GCCCACATCATTTCCCTTCCTCGGCCCAGCCCCACAGCGCGCAGC
TTCGGCAGGGTGGCTTTACGGCCGGAGGAGAGGGTGGGTCCCAGA
CCTGAGGTAGGAGGCCGAGCTGAGGGGCGGGGAAGAGGCTTTTTG
CGGC

[0227] In some embodiments, the intronic domain that promotes trans-splicing primarily in the brain comprises or consists of sequences from the gene GOLGA7. In some embodiments, the sequences from gene GOLGA7 comprise or consist of:

(SEQ ID NO: 174)
TTTGTGTTTCCCGGGCCGAACCGGGTTGTGGGGGGCGCGGGGCCT
GGGCCAGGCGGCAGCTAAGGCCCGCGGTGACAGCATGGGTGAAGG
GGAGCGGGGCAGAGGAGGCCTTGGGCTGTTTTCGGCGGCGGGTGG
GGGCGAGGGGCTGGCGGGTCAGAGTCCCGGGTCCAGGCCGGGGCT
CTGACTCGCGGTTGGTGTTCCCCCGACCCCGCAGCGCGGGGTGTC
CTGTCCTCGCCATGAGGCCGCAGCAGGCGCCGGTGTCCGGAAAGG
TGTTCATTCAGCGAGACTACAGCAGTGGCACACGCTGCCAGTTCC
AGACCAAGTTCCCTGCGGAGCTGGAGAACCGGGTACGCAACCTGG
CTCCCCACGCCTGCTCTGGCGAGGGAGAGAGACTCACCGGGGACG
GGAAGGGTGTGGGCGACAACCGGGCCTTTGAGGGTCCCGCAGTTC
TGGGGAGGTCCAGGCACAGAAGGGGCCTTGGCCAAACGTGTAAGA
AGAG

[0228] In some embodiments, the intronic domain that promotes trans-splicing primarily in the brain comprises or consists of sequences from the gene TPD52. In some embodiments, the sequences from gene TPD52 comprise or consist of:

(SEQ ID NO: 175)
GTAAAGTATATTTTTATGAAATGTAGTTGGTCTTATGCTTTATTT
TTCTTTATTTAGATGTTTAACTTGAACTGTTCTGAATTAGGGAAC
TAGAATTCCCCTTGAAACAAGCTGTGTGTTTAACACTCTATCAGT
TTTCAGCTACACTTCCTCTGATGTTGGGATGGGTGCAAGAGATCC
GTTAAATGTTTTGATTTTGTTTTTAAAAAAATTATTTCTATTTTA
TTTTGTAAAACCTTTGTTTCCTGTCTGAAATCTGTTCACAAAGTG
AGCACTACTTGTTAACAAACCTTCTTTTGTCCCGCCACCTCTGTC
TGCATTCGCTTTAGTTACATTCTCCTTTTCTTCATCCTTCCCATT
TTCACTTCCCCCATCCCACTGTGACATTTGGAGCCAACTATGATT
TAATTCTACTATCTGCTTTCATTAGCACTTGCAAGTGATATTACC
TCACCTAACCTCTCTAGAGAGTTAGAGGATTTTTAACAATCTGTG
CTTG

[0229] In some embodiments, the intronic domain that promotes trans-splicing primarily in the brain comprises or consists of sequences from the gene TPD52. In some embodiments, the sequences from gene TPD52 comprise or consist of:

(SEQ ID NO: 176)
GGTAACCTTGAACCTGAGTGGTCAGTGAACTGCATTGTCCTTGAG
TGGGCAGTTGCCTCCTTGTCTTACTAAGAGCCCTTCCCTGGCCTT
GCTTGTGTGTGTATGTGTGTATGTGTGTGTGTGCATGCTTCATTT
TTGAGGGGAGGCGATAAACACTGAATTAGACCCAAGTTCTATTCT
TGATTCTGCTGTGACCTACGGTAACTCATTTAACACCTATATGCC
TTACAGCTCCGGGTGAAAGCACTTTAGTTTTCAAAGTGCTGTAAA
AATGCAAGGTGGTATTGTTAGCTCTAGTAACTCCTGGGAATTAAT
TGGCTCCTGAATAAAAGTAAATTATGTTGGAATAACTTTGATCCC
CTCCACCTCAAAAAGTAGGTAATTCTTCATGGCGCCAAGAGAATA
AAGCTCCTGGGGAGCTAAGTTTTGTCAGCTTTTAATAATGTTGAA
GCACCACTATACTAACCTTATTTCTATCTCTTTTTAATGCTGCCT
CTTA

[0230] In some embodiments, the intronic domain that promotes trans-splicing primarily in the brain comprises or consists of sequences from the gene DCTN3. In some embodiments, the sequences from gene DCTN3 comprise or consist of:

(SEQ ID NO: 177)
GACCAGTGTGTGGAAATCACTGAGGAGTCCAAGGCTCTCCTGGAG
GAATACAACAAGACTGTATCCTTTCTGCTCAACTAGGACCCTAAT
GGGTGCTGTCCCTAAGCCCTGTCCTTTTGTTCCACCTCTAGCTCT
CTCTCATCCTATCCTACCCACCTATGTTTGCCTGTTCCCCACTTT
CCATGAACTTCCTCACTCAGATTCCTATTCTCACCTTGACCTACA
ACCAGACAATGCTTCTCTCCAAGCAATTCGTGCAGTGGGATGAGC
TACTTTGCCAGCTAGAGGCCGCCACGCAAGTGAAGCCAGCAGAGG
AGTGATAGCTGCTCCCCATCCCAAAGTGGGCCTGGGCAGTCAGGC
TCCAGGGCCCTATGCCAACCTGCCTTTGTTACAAGGCAGAGGAAG
CTTTGTATTTATTGGCTTCAAGGCCCACCTCTCTGTACTCTGGGC
TCTAAAGTTGGAGGTCAGGTTACCTGAGGTTTGCAATTTGCAACA
CCCA

[0231] In some embodiments, the intronic domain that promotes trans-splicing primarily in the brain comprises or consists of sequences from the gene DCTN3. In some embodiments, the sequences from gene DCTN3 comprise or consist of:

(SEQ ID NO: 178)
CAGCTTCAGGCCTTTCTGTTGTAACCTCAGCAGAAACTTTGGGGT
TTATCCTTTATCTTGCATATGCCCCAGGGAGGTAAAGGGACTTGC
CTAGGTTCATGTAC
AAACTTTCTGCTTCCAGAGCAGGACTTTATTGGGACACCATAAGG
TTGAGGCTGGGAGGTACCCAAGAATTCCTGGGGATGGTATGTCAT
TGACTGTGGGTAGAGGGGCTCTTTTTTCACTATTCCCAGGCCCTA
GTGTAAAGTTCAAAGAGAGTTCAGAAATAAGGACAGAAGAAGAGA
CATACACTAGGGGGAATGTTTACTTAATGTATGGCCACTCCCTTT
TCCATCCGTCTTTGGACTGCTGTTAGGGCACCCATCCTGGAGCCT
GAAAGTGCTCCCATAGCCATTTGCTCCTTTGGCTTTGGGGTTAAG
CGTCATCTTTTTTAGGCTCCATGGGGAGTGGGAGTCCGTGATGAG
GCAGGAAGTTTAGTGGAAGATGTGGGCTTTGCCCA

[0232] In some embodiments, the intronic domain that promotes trans-splicing primarily in the brain comprises or consists of sequences from the gene SPIN1. In some embodiments, the sequences from gene SPIN1 comprise or consist of:

(SEQ ID NO: 179)
TGGTGAAGACGTCTCTTCCAGGGAGTCACAGGAAGCAAATCCATC
CTTTTAAAGGGCTCGCGTCCCGCGGCCCTGAACCGGCGCGCTGGA
GCAGTAATGCGACGTTCTCCGAGGTTCAAGGCTCACGGCCCAGCC
CTGTGATCCAGTTTCCTCAGTCTTCGCGGTGTGCACCACTCAGGA
CGACTTGCGGCTTACGTCCAGGACAAAGGGGGCTTGTCCTTTCTT
CAACGTCCTACTGCGCAAAAACGAAGCCCTTCTCAGGCTGCCTGC
CTTCCAGGAAAAGCTGCGCCCCCTCAGGAACCTGTGCCCCGCGCG
CCTGCCGCCGCCCATTCCCGGCGCGCACCTGGCAGTCCCGGGCTC
GAGCCCCGCCCTGCCGCCAGCCAGGTGAGAGGGGCCAGGCCCCGC
CCTCGCCGGCCCCGCCCCGCCCCACTGCGCCTGCGCAGTCGGCCG
TCGGCGCCAGGCGCCGGGGCGGCGCGGCCGTCGCAGTTCGGCGGG
CGCA

[0233] In some embodiments, the intronic domain that promotes trans-splicing primarily in the brain comprises or consists of sequences from the gene SPIN1. In some embodiments, the sequences from gene SPIN1 comprise or consist of:

(SEQ ID NO: 180)
TGAGGCCCGCGCAGGGCGGGCGTGGGTCGTGAGGGAGTGCGGGCT
GCGGGCGGGCCAGCGGTGCGGCGGTCTGCCCGGGGGCGCAGGTGA
GCGCGGCCCGCGCGGGGCCCGGCGGAGCATTGTCCAGCGGGCGGC
GCCCGCATAGCGCCCCCTGCCGGCTGGGCCGCGGCGGGGACCCGG
GCTGGGCGGGCCTGGGCCTCGGGGCGGGCGCGCGCTCCTTTGTTC
GCCGGCCCCTACTCCTCCGTGCCCCCATCCCCGCCGCCCCCCGCC
AACATGGCCGCCACCCTCTCGTCCCCAGTTCCCCGGCCGCCGCCG
GCCCCTTAGCGCGCGCTTTGTTTGGAGCCGGGCGGGGAGGCCGGC
GGGCAGGGGGCGGCGGCGCTGCGCAGTCGGGCGCGGGGAGGGGGC
GCTGCGCCAGAATGCAGGCGGGGAGGGGGAACGTTGCATAATCCC
GGGCCGGCGACGGGGGCGGGGCGGGGGGAGGGGCGGGACCCCGGC
GCGA

[0234] In some embodiments, the intronic domain that promotes trans-splicing primarily in the brain comprises or consists of sequences from the gene SEMA4D. In some embodiments, the sequences from gene SEMA4D comprise or consist of:

(SEQ ID NO: 181)
GTAACGGGCTGGGCTGCCCTTCCCCTCTGTTCGTGGGTGGGTGGT
TGCACAGCTCCTCCCTCCTGTCTGCCCCAGTGCTGTCTTCCCCAG
CACATGCAAGCCAAGCTGATCCTGCGTCTAAGGAAGTCTAGAAGG
TTTAAACTCACAATAATTTGTTTTCAGTGCCTTTCTAGGAGTGTT
GCTGAGTTTAAGTGGATGCACAGTTTAAGGGCTTAAATAGCCTTG
TTTCCCATTATTTTCACAGCAAAGATTTCTGAAGACGTCTTTCTA
GAAATGACTGGAAAGTTTCAAGAGGCATAAGATACAGGTAAAACC
ACTTTATTCATGATCTGTAATTTCAGTTGAGCAGAGTTGATAATG
TGTAGAGGCCTCAGTTGGATCTGGCAGGTGGTTGGTTGCTTGGTC
CCTTGGTCCCTGATATCCTGTGGGGCAAAGCTTCAGACTTGGCTG
CCATCCCTTGGGCCCGGCATGGGGAGGTGGGTGCTGGGCACCCAC
AGTG

[0235] In some embodiments, the intronic domain that promotes trans-splicing primarily in the brain comprises or consists of sequences from the gene SEMA4D. In some embodiments, the sequences from gene SEMA4D comprise or consist of:

(SEQ ID NO: 182)
CAAAAAAAGAGCCGTGATCATATAAGCTCTGAAAGCAAAAGGCAA
ACAAAAAAGAAACCCTCCTCACCACAGAATATGCTGGAGTCTGAT
TCCAAGGTTTAACAATTACGTGGCTCCTGTGTTAATAGAATCATG
GAGGGATCAGCGTCGGCTCCTGAGCGTCTGCAGTCCTGCACGTGG
CTCTGGTTTTGCGATTCTGATTCTCTTGATCTAATTGTTGGTGCT
GCTACTGCACCCCACGATCCCTGTCTTGAGACTGATCTCCCACAC
TGCAAAGGAGTGACAGCCATGCTATGGAACCTTGCCACACCACGG
TGGACACCGTTCTGTTTGGCTGAAAACCAGCCATCCAAAAATAAA
GGAAGATGAACAGCTCTTTAGTGCTTGTAATTATGCCATATGTGT
TTCTGCTTTTTCCTTCTTTGCCTCATGAAGATGAATTTTAAAGGA
TACATATCTGGAGCTAATAGACAATTAGATAGTACTTTTTTGGTT
CACA

[0236] In some embodiments, the intronic domain that promotes trans-splicing primarily in the brain comprises or consists of sequences from the gene GSN. In some embodiments, the sequences from gene GSN comprise or consist of:

(SEQ ID NO: 183)
TGCTTAATGGTCCACTTTAAGGACCAGGGATGCACTTGGCATTTT
CGTTACTTCATTCGGAATGAGCTGGGAATCGCTCTTCCTCCTTAT
TCCCTTCCGTGGGAGGGAATCTCCCCTGCTTTGCATGCAGCCTAT
GTCACTCTTCGAGGGCTTTGCCTCCTGAAGTCCGTTCTCTCCAGG
GCTGAAATCTGCCTCCGCTGGTGCTAGTTGAGCATTGCTCGCTTG
CCCGTCCCATCTGAGCTCTTTGGCCCCAGCCCAGCTCAGGAGCTG
CCCTGGGTCTCCTCCCCGACCCTAGGCCTCTTCAGATCTCCCCTC
CGTGCTCCGGGCCTCAGTTTCCTCCAGGGGAAAGCAGAGGGCTTG
GTTTGGTGCCTTCCTGCGAGGTGAAGCGAGGGGTCCCCCTGGACG
AAGGCGAGCTTGGAGCCACCCGCCCAGCAGCCGACGGGAGGGCCT
GGCGCTCCTCCCCCACCCGCCTGCCCGGCCGCCCCGCCCCGAGGG
CGGC

[0237] In some embodiments, the intronic domain that promotes trans-splicing primarily in the brain comprises or consists of sequences from the gene GSN. In some embodiments, the sequences from gene GSN comprise or consist of:

(SEQ ID NO: 184)
TAGGGGAGGCGCGCGGCCCCGGCCCCGGGCATCTGGGGGTCCCGG
GCTGATTTGAGTCCTTCCTCTCCCTTCCTTCCCGGTCCTATCTCG
CCCGCGCCTGGAGCTCGGCCCGGCCGCGGGGGCATCGCTGGAAAA
GGGCTTCCTCGCTCACTTTTCCCGTCTTCCAAGGGACCAAAGAGT
GTGGATGGGAGTTGGGGGATGGGGAGACGCCGGAGCAGGAGAGGA
GAGGGGCCAGGCCTCCACCCCGTGATTCCACTGTGCTGCTAGCAC
CTGAGCTAATAACCTCGACCCCGCCCCCGGGATGGGGGAACTGGC
CCGGGGTCACCCCTGCACTTGGGTTGTCTGACCCGGGCATGCAGG
GGACCACCAGCTACGGTCTGGGCGGTGACTCTGCTGGGGAGTCCA
CTCAGAGGACCCTTGCCTCCTGGACGATACCTGTGCCTGCTCTCC
TCTCCAGCTGCTTCCTCTTTCTGGGGACTGTTAGAAAGTTCTTCC
TTAC

[0238] In some embodiments, the intronic domain that promotes trans-splicing primarily in the brain comprises or consists of sequences from the gene STXBP1. In some embodiments, the sequences from gene STXBP1 comprise or consist of:

(SEQ ID NO: 185)
GTCAGGTCACCAGCTCTCCACATAACTGTTTTTCCCTTCTGTTGT
GTAGCCCCGGTGATAAAGCTCTCTGCTCCCTGCTTGCATATGTAT
TGCATGAATGTAGTGAGTAATTCTGAGCCCAAACACAGCTTTTCT
GGACAGAAGCTGTCACAGCCAGGCTTTGGGTGTAAATCTTCCCCT
TCATCTTTAGACCTGACTTGAGGTTCCATATATCGGGAGGTGGGA
ACCTGGGGGTATGCAGTTGCCCATGAAGATTCATGGAGGGGCCTC
GCGCAGACAGCTGACGTCCGCTGTGTGGCCTCCCCTGCTTTGTGC
ATGCCAGCCTCCTTGCTACCATGTGTGTTCATGCGCGCTTGTGTG
TGTGTGTATGCATGCGCACACATGTGTGTGTGTCTTGCTTTCTCA
TACCTCATTGGCTGCATAAAATGTAGGCCTAAGTTGGCATGTTCC
TGTGACGTACCTTTGTTCAAGCAGTCAGCTGGCCTCTGTTCTCCC
ACAG

[0239] In some embodiments, the intronic domain that promotes trans-splicing primarily in the brain comprises or consists of sequences from the gene STXBP1. In some embodiments, the sequences from gene STXBP1 comprise or consist of:

(SEQ ID NO: 186)
TAAAAGCAGCTTATTACAGAAAAGAAACTCTTCCACTCTGAAGGG
CTTTCTTTGATTATTCCGTCACTCTTTTTCTTTATTTCTTCCTTT
TTAGTTTATTATTTATTTGATTTTGTTTCAACAAGAAAATGCTTG
CAGTTCTCAACACCGATTGAAAATGTGTCCAGTGCTGCCCTCACA
GCCCTGCCATGAACCCTCTGGGCTCTGACCTGCTGGCTCACCCAT
GCCTTGGGTTCCGCACTGCTTAGTCAGACGCCTGCAGGCTGCTGG
GTGGAAACTAAAAATGATAATGACTGCTGTGAACAGTTGTCAGAG
AGGGAGCTGAAGTTTTGGGGGATGCCTGAGGCACAGTGCCCAACC
CTGCTGGTCTGGGATGAATTTGTGGCCCCCACAAGGAATGTAGAG
TGTCCTGGTTGTGCTGGGTGTGGGGGTCTGAGAGCGAGGCCAGTG
GACATTCAGGGAACACCATGTCCAGGAAGGCAGGCGGTGGTGGAG
ATGG

[0240] In some embodiments, the intronic domain that promotes trans-splicing primarily in the brain comprises or consists of sequences from the gene FAM102A. In some embodiments, the sequences from gene FAM102A comprise or consist of:

(SEQ ID NO: 187)
CTGGGCTTCGCTGACTTGAACCTGGCCGAGTTTGCGGGCTCGGGC
TCCACGGTGCGCTGCTGCCTGCTCGAGGGATATGACACGAAGAAC
ACTCGCCAGGACAACTCCATCCTTAAGGTACCAGGGATCCTGCCA
CCTCTGCCACCCTGACCACGGGATGGGGACAAACCAGGCTGCTCA
TCAGAATCCTCTGGAGGAGGGTTGTTAAAAATACAGGCCTTACCT
GAATAGGTAGACATCGGGAAGGGGCGAGCCCTGGAATCAGGAAAC
CACTATCAGAGGGAGGCCTGGCTCCGCTGTTGGCCTCAGTTTCCC
CATCAAGTTCAGAGAGGGGGCCCTGACAGTCTCCAGGGTTTGGCA
AGCACCTGCAGTGGGTTCACGTCATGCTGATTGCATGCCCTCTCT
TCTCTTGTGGTCCCCTGACAGCAGCCCCACGAGCTGTGGTATCTT
TGATTAGTCCCAGCTTCAAATGGGAGGGAGTTAAGGCACAGACGT
TAAG

[0241] In some embodiments, the intronic domain that promotes trans-splicing primarily in the brain comprises or consists of sequences from the gene FAM102A. In some embodiments, the sequences from gene FAM102A comprise or consist of:

(SEQ ID NO: 188)
ACCACCTCGTCTCAATCTCACTTTCCCCTCCAGGTCTAGCAGACT
TGGCCTCCATCCACAGGGCCTTCTTAGCGCATGCCCTCTTCGCAC
TTACTCCCACTTCCCTCCCCATCCCTCGATCCTCTGTCCAGAGGT
CCCAAGGGCCTGTTCAGACCCTGAACTCTGCCCAGCAGCCCCTCA
CTCTGTCCTCTACCAGGGCGCCTTCCCTGGGGCTCCTGCTCATCC
TGCAGTGCCCCTCCCCTCCCAACCCCTGTGGGGGTGTCCCATCAC
TTTCCCCAGCACCCACTTCCCACAGGCCTTCCCTCCTCCCCTGCC
TGCTGACCCGGCAGCTCCCGACAGCACGGCCTTGTTTCCCAGGGA
ACAATGCATCTGTGTCACGGACAACAATGTCCTTTCATGTCAGGC
GCACTGGCCCCGGTGCACGCCGGGACGTGGCACAAAGGGTGCTTT
GTGCAGCTCAGGGATGTGAGTTCCTGGCTTTGCCATGTTGGTGCT
GCCG

[0242] In some embodiments, the intronic domain that promotes trans-splicing primarily in the brain comprises or consists of sequences from the gene PTGES2. In some embodiments, the sequences from gene PTGES2 comprise or consist of:

(SEQ ID NO: 189)
GTACGTGTTACAGACGGCCACGCCGCCCTTTAGGCGGTCAAGGTG
GGGCGAGGAGACGTTCGCCCCCCTGCAGTCGGCCGGGTCACTACC
CAAGAGCCTTTGGAGGCGGAAGCATGGAACGGTCTGCAAACGTTC
CCGAGCGGGCCTCTGCGGCTCTGGCGGGCGTTTCGAACTTGGGCG
CCGGGCACACGCCCAGTCCCGAGAGCGCTGAGGGTTCCCTTAGCG
TCGCCCTCACCCCGGCCAACCCGCGGGGCGCCAGAGTCCTGGCCC
TTTAAACGCCGCGCGTGCCTCGGCGTCTTCGTTTCGCGCGCCCGC
CCGCGGCGCCGGCGGAGCGAACATGGACCCGGCTGCGCGGGTGGT
GCGGGCGCTGTGGCCTGGTGGGTGCGCCTTGGCCTGGAGGCTGGG
AGGCCGCCCCCAGCCGCTGCTACCCACGCAGAGCCGGGCTGGCTT
CGCGGGGGCGGCGGGCGGCCCGAGCCCCGTGGCTGCAGCTCGTAA
GGGG

[0243] In some embodiments, the intronic domain that promotes trans-splicing primarily in the brain comprises or consists of sequences from the gene PTGES2. In some embodiments, the sequences from gene PTGES2 comprise or consist of:

(SEQ ID NO: 190)
CCGAAGCCGTCGTCCTCGCCTTCCGCTCTCGTCTTCACCGGCATA
CTCAGGTCCCCGCTGGGGACTGACACTGCGGGCTCGGTCGCCGCA
AGGACTGGAAGGAAGGTGGAAGATGCGGGGCGAAAGCGGAGCGAG
AAGAGTGGGACGCGGCGGAGCAGCAGAGCCGGGACTCAGAGCTCC
CCCCTCGCCCCGCCCCTCTCCCCGCCCACTCTGCGAGTCCCGCCC
CCTCTCGGGCGCCGGGCGGGGCCATCCCGGGGCTGTCCGCGGAGA
CGCCTATGCGGTGGAGGCTCCGGGCTTCAGCTAGGGCGGGGGAGC
CCAGCAGAAGGACCGAGCAGCCTGGCACCCCACTTTGCCATCCTC
TCCCTGGAAATCTCGGGGTCGGCGGGCCGGCCGCTTCGCGTGGGC
GAAATCAGAGACACGTGGTTTCCAAGGCCCCTTCGGGTTCGGGAA
AATTTTATGGTTCGGGTCACAGTAGGAAGCGGACAATGAGGCGGG
AGGG

[0244] In some embodiments, the intronic domain that promotes trans-splicing primarily in the brain comprises or consists of sequences from the gene DNM1. In some embodiments, the sequences from gene DNM1 comprise or consist of:

(SEQ ID NO: 191)
ATGAAGCAAATTCTGGGACACTGGGAAACGTAGAATTGAACAGGA
TGGGTGGATGAGGTCCTGGCCTTGTCCTGGCCTGGGTCAGCTCCT
TAGGAGAACCCAAGGCTGTGGACAAAGACGGCACTGGGAGAGAGC
AGGCAGCCTCAGTGAGGCCGAGGAGCAGGGGAGCATCCCTGGGAA
GAGGATCTGAACTCAATAGGGGTCTTGTACGGAGCAGGGGCTTGG
TCCCTCGTACCTCTGGCCATACCTATGGAGCCCAGGGGATGCTTG
GCAGCACCTGGGAGGTGCCAACCCCGGGTGGCAAGGGAGGGCCGG
TCCCACGCTCACATTGTCTTCTGTTCTCTCTCTCTCTTTATCTGT
GTCGATGTCTCTCTCTCTTCCCCCGTGCCCGTGCCATCCTCTCCA
CCCCTGGATTCCTGTCTCTGCTTGGCTTTCACCCACTTCTCCTCC
CCACCCACGGCTGCTCCTCCTCCTGTCCCCACCTCCTCCCCGGGT
GCAG

[0245] In some embodiments, the intronic domain that promotes trans-splicing primarily in the brain comprises or consists of sequences from the gene DNM1. In some embodiments, the sequences from gene DNM1 comprise or consist of:

(SEQ ID NO: 192)
TATGACGGCCGCCTGGGCGGGGCTGGGCCTGGCCGTCCATTCCTT
GTGGCCACAGCCTCCCGTGGGCAGAAGGATCTGCTGAGCCGGCCT
CACGGCTACCCGCAGGGACCCAGCCCTAGTGTTTCCTGCCAGTTT
CTAACCCTGGGTACTTGCACTCATGACCCCTCCAGGCCCCCATCC
CAGAAGACTTGACTCCAACCCAAGCCTCCTTGGTGGCACCTATGC
TAGTGATGAAGATGATGTTAAGGAGATGGCAGCTGTTTACTGAGC
ACCTACTATGTGCCAAGCACACGCTAAGTGCTTGCCCTTACTATC
TGACTCAGTCCTCTCAACCACCCTAAGACGTGGGTAGTGTTGTTA
TTCCCATTTTGCAGATGGCAAAACAGAGTCTCAGAAAAGAGAAGC
AGAGTGTGATTCAGTTTTAGGAAGGACAGAGGAAGGGGTCTGAGG
TCAGGGCCTCCTGGGCAGGGGGAGCTGTCCTAGTTCCTCAAAACC
AATT

[0246] In some embodiments, the intronic domain that promotes trans-splicing primarily in the brain comprises or consists of sequences from the gene URM1. In some embodiments, the sequences from gene URM1 comprise or consist of:

(SEQ ID NO: 193)
CTGGAGAGATAAAGGTGGAGGGGGCTCTTCAAGGTCCTCTCAGAA
GTCCAGCCATGGCAGTTGGAGACTGGCTTCCAGGACTTGTGGGTA
GGGGCCTGTCTCCTAACCCTTTAGATGCGACAGTCCTCCCGCCGT
CTGCCTTGAATCCCCCCACTATAGGTAAATCCCATTGCCTCTTCT
CCAGGACTTCAGCAGTGCCAGGTGCAGCTTTCTCTGAAGATCCAC
CTGGCAAGTCACTGGCCTGTCCTAACCTGTTTCCTCACCTTTGGA
ATCTACAAGTTCATGGGCTATCACAGCCTGGTCTAAAAGAAGCCC
TCTAAACACCGTGTGTATTTCCTTGTGGGCCAGGCAAGGCTCTGG
GGGTGGGCAGGTGCTATTTGGGTTTGACAAGAGTTTGTTCTGTGC
ATTCCTTTCCAGGGGACATCCGGAACCTGCTCATCTGGATCAAGA
AGAATTTGCTAAAAGAGCGGCCAGAGTTGTTCATCCAGGGAGACA
GCGT

[0247] In some embodiments, the intronic domain that promotes trans-splicing primarily in the brain comprises or consists of sequences from the gene URM1. In some embodiments, the sequences from gene URM1 comprise or consist of:

(SEQ ID NO: 194)
CGGCCAGGAATTCTGGTGCTGATTAACGATGCCGACTGGGAGCTA
CTGGTCAGTACCTTGGGGGACATCCCTCCCCCAGCCCCTGCCCTT
GCTGCTTCAGTGGGAAAGCGTTGGGCCTCTCCTCAGGCACATATA
GAGTGGCTGGGTAATCCTCCGCCCCACTCCAGCCCCACACTGAGG
CTGCTGGAGTCTCCCACTCCAGGTGAGGAAGGGATGGGTAGCTGG
GGACATGGGAGTACTCCTCCATCCTGAAGATTTGCAGGTTGAGGT
ATAGGATACCCATTTTTCTGGTAGAGTCTGTCTCTTCCAGAGCAG
CCAGTCCTCAGCCCCTGTTCTCCCAACTCCTGGGGTGGACCTGGG
AAGGTGGCCCTGAGGGTCTCCCGCTCCCCTCTCTCCCGCACCAGG
GTGAGCTGGACTACCAGCTTCAGGACCAGGACAGCGTCCTCTTCA
TCTCCACTCTGCACGGCGGCTGAGGGCCCTTCTCTGGGCCTGGGC
ACCC

[0248] In some embodiments, the intronic domain that promotes trans-splicing primarily in the brain comprises or consists of sequences from the gene SH3GLB2. In some embodiments, the sequences from gene SH3GLB2 comprise or consist of:

(SEQ ID NO: 195)
GTGAGTAGCCGGGGCTGGAGTGGGGCTCCTGGGGCTGGGGAGGGG
AGTTTGCCTCTGGGGTCCCTTCTGGGACTCCCACCTGCTAAGATG
TATCCCTCCTCTCCAGATTTCCCGGCACCTTCGTGGGCACCACAG
AGCCCGCCTCCCCACCCCTGAGCAGCACCTCACCCACCACTGCTG
CGGCCACTATGCCTGTGGTGCCCTCTGTGGCCAGCCTGGCCCCTC
CGGGGGAGGCCTCGCTCTGCCTGGAAGAGGTGGCCCCCCCTGCCA
GTGGGACCCGCAAAGCTCGGGTGCTCTATGACTACGAGGCAGCCG
ACAGCAGTGAGCTGGCCCTGCTGGCTGATGAGGTGGGCCCGGTGC
CGCAAGGTGGGGCAGGAATGGGCTGGGTGAGGAGCAGCCTGGGCA
CTGGGATCAGGCACATGGGGCCTGGAGGGGCCCTGTTGGCAAAGT
GGGGACCAGCAGGTTAAAGAGGGCATATCCAGCTCTGAGGAAAGG
ATCC

[0249] In some embodiments, the intronic domain that promotes trans-splicing primarily in the brain comprises or consists of sequences from the gene SH3GLB2. In some embodiments, the sequences from gene SH3GLB2 comprise or consist of:

(SEQ ID NO: 196)
GCCGGAGCAAGGTCTGGTAGAGGACGGGGATGGGGACGGAATTTT
TTGTTCTGAGGGCGGGAGGTTAGAAGTCAGCCTCTGGCCTCTTCC
CCGCAGGTGAACCACCTGCGCTGCCTCCACGAGTTCGTCAAGTCT
CAGACAACCTACTACGCACAGTGCTACCGCCACATGCTGGACTTG
CAGAAGCAGCTGGGCAGGTGCGGGGCCAGCACTGCTGAACCCACT
GGGGCCCCCTGGCTCCCATACCCTGTCCGTGGGCAGCATGAGCTC
CTCTGGGCAAGTCCTGTGACACAAAGCTGGGTTGGAGGGCTCTGC
TGGAACCCACTCTGGGTGCGGGCATCTCATGTGTATGAGGGTGGA
GTGGCTGGCCTTACTGACGGCCAAGTCCCCTGGAGCCCCTGAGGG
TTTCTAGGGAATGCCTGGGTGGGGAGGATGGCAGGGACCAGGGGG
TGGGGCCATCTCACCCTTCCCTTGCTTTGCTTTTCCCTTTGTGCT
GCCA

[0250] In some embodiments, the intronic domain that promotes trans-splicing primarily in the brain comprises or consists of sequences from the gene AIF1L. In some embodiments, the sequences from gene AIF1L comprise or consist of:

(SEQ ID NO: 197)
CTAAGCCCCTCCAGCCTCTGTCATGCGTGGGCACACACTTTTGCA
AAGCTGCCTGATCGTTGCAGGGGTGAGGATGGAGAAAATAATGGA
CCGAATGGCAGGCCTGTCCATTCATTCAATGGATGTTTTGTTGTT
GTTGTTGTTGCTTTTTTTTTTTTTTTAGAGACAGGGTCTGGCTGG
AGTGCAGTGGTGCAGTCAAAGCTCATTGCAGCCTTCACCTCCTGG
ATTCAAGTGATCCTCCAGCCTCAGCCTCCCAAGTAGCTGGGACTA
CAGGCACGCACCACCACACCCAGCTAATTTTTTAATTTTTTGTAG
AGATGGGATCTCCCTATGTTGCTCAGGCTGACTTCAAACTTCTGG
CCTCAAGTGATCCTCCCTCCTCGGGCTCCTCAACAGATGTTTATT
GAGTGTCTACGATATGCTGGGCACTTCGACGCTAAACCTGTGGCT
GGGGCCCTGCCTCCTCCGAGCTGCCTCCTGATACCCACTTCCTCC
TCAG

[0251] In some embodiments, the intronic domain that promotes trans-splicing primarily in the brain comprises or consists of sequences from the gene AIF1L. In some embodiments, the sequences from gene AIF1L comprise or consist of:

(SEQ ID NO: 198)
CAAGTTAGTTAACCTGAGTCTCAACTCCTCCACTCATCCTGCACA
TGTTTATTGAGCGTCTGCTATGTGGAACCTACATTCTAGCCGGGG
AGGCAGAGAGGGTGTAGTAACCTCAGTAAGCAGTGGCAGTGGAAA
TCATGTTTGGAGGTGACCCATCCTAAGGAGCTGGATAAGGGCGAT
TGGAAGTCGGGGCAGCTGAAGTGGGCAGGCAGCAGTATAAAACAG
GGTGGACAGGGCTGGGCATGGTGGCTCACACCTATAATCCTAGCA
CTTTGGGAGGCCGAGGCAGGCAGATCACTTGAGCCCAGGAGTTTA
AGACCAGCCTGGGCAACAGAGGGAGACCCCATCTCTACAAAAAAT
ACAAACATTAGCTGGGTGTGGTGGCATACACCCGTAGTTCTAGCT
GCTCTGGAGGGCTGAGGTGGGAGGATTGTTTGAGCCCAGGCAGGT
CGAGGCTGCAGTGAGCTGTGATCGTGCCAACAAAGAATAAATAGG
GTCG

[0252] In some embodiments, the intronic domain that promotes trans-splicing primarily in the brain comprises or consists of sequences from the gene SURF4. In some embodiments, the sequences from gene SURF4 comprise or consist of:

(SEQ ID NO: 199)
GTGAGTTGTGTAATTATTTCATTATGTATTACAACATAATAATAG
AAATGAACTGCACACTAAGTGTAATGTGCTTGAATCATCCCAAAA
CCATCCTCCCGCCTCCATCTGTGGAAAAATTGTCTTCCACAAAAC
TGGTCCCTTGTGCCAAAAAGGTTGGGGACTGCTATTTTTTTTTTT
CTTTCTGAGACAGAGTTTTGCTCTTGTTGCCCAGGCTGGAGTCCA
ATGGCGCTATCTTGGCTCACCACAACCTCTGCCTCCTGGGTTCAA
GCGATTCTCCAGCCTCAGCCTCCCGAGTAGCTGTGATTACAGGCA
TGCGCCACCACACCTGGCTAATTTTGTATTTTTAGTAGAGACAGT
TTCTCCATGTTGGTCAGGCTGGTCTTGAACTCCCGATCTCAGGTG
ATCCGCCCGCCTTGGCCTCCCAAAGTGTTGGGGATTACAGGCGTG
AGCCACCGAGCCCGGCCAGGGACTGCTGTTCTAAGCCACAGCGGG
CTGA

[0253] In some embodiments, the intronic domain that promotes trans-splicing primarily in the brain comprises or consists of sequences from the gene SURF4. In some embodiments, the sequences from gene SURF4 comprise or consist of:

(SEQ ID NO: 200)
TAGAGCCTGTGATTTGAGCCAAATCTGGAGAGATGGCCACCAAGC
CAGAACTCTGTGCAGAGACCAAGTGCTATGGGGCAGGGGGCTGGG
CCGGGGATTGCTGGAGGCTGACATTCATCAGAGGATTGGGGGAGG
GAGGGCAGGACCCAGAGGAGGAGATATGAGGATGGAAGCCTGAGC
CTAGGGACTCTCGGAGCCCATAAAAGTCTTAGGAGTCTGTAATCC
AGCCTTGTGAGCAGCCTGCTCATGACACTGGATATTCTAAGCCAG
GGGTCCCCAACCTAGTCCGTGGCCTGTTAGGAACCAGGCTGCACA
GCAGGAGGTGAGCAGCAGGCAGTGGAGCAAAGCTTCATCTGTATT
TACAGCCGCTCCCCATGGCTCGCATTACCACCCAAGCTCCACCTC
CTGTCAGCTCAGCAGCAGCATTAGATTCTCATGGGAGTGTGAACC
CTATTGTGAACAGTGCATGTGAGGGATCCAGGTTGCATGCTCCTT
ATGA

[0254] In some embodiments, the intronic domain that promotes trans-splicing primarily in the brain comprises or consists of sequences from the gene ABCA2. In some embodiments, the sequences from gene ABCA2 comprise or consist of:

(SEQ ID NO: 201)
GCCAGCCTTCTACACAGCGGCGCCCCTGACGTCTGCCGGCATCCT
GCCTGTCATGCAATCGCTGTGCCCGGACGGCCAGCGAGACGAGTT
CGGCTTCCTGCAGTACGCCAACTCCACGTGAGTGCCCACCCGCCC
CTCGGAGCACCCACCCCTCCCCAGCCCATCCAGTGAGTGACATCC
GCCATGGTGCAGGGTCACGCAGCTGCTTGAGCGCCTGGACCGCGT
GGTGGAGGAAGGCAACCTGTTTGACCCAGCGCGGCCCAGCCTGGG
CTCAGAGCTCGAGGCCCTACGCCAGCATCTGGAGGCCCTCAGTGC
GGGCCCGGGCACCTCGGGGAGCCACCTGGACAGATCCACAGGTGT
GCCCTGTGCAGGGAAGTTGGGGGGCAGGGCTGCGGGCAAAGCTCT
GCTGTCACTGGGCTGAAGCCCACATCCACTCTGGGCCCCTCCACC
TGCACTGAGTTCCCAGCCACGCACAGGCTGCAGTGGCAGAGCTGT
GGTG

[0255] In some embodiments, the intronic domain that promotes trans-splicing primarily in the brain comprises or consists of sequences from the gene ABCA2. In some embodiments, the sequences from gene ABCA2 comprise or consist of:

(SEQ ID NO: 202)
CGGCTTCTGGGCTGAGTCTGGGCTGAGGCTGGGCTGGCCTGGGCT
GGGGCTGGAGCGGCCTGGCTACTCTCCCTTCATACTCCTTCAGGC
TCTTGCACTCACTCTGCTAACCAGCTGGCCAGAGGTCAGAGGTCA
CTGCCCAGAGGGGGTCCTTTGTCCTCCCCTGGGCTCTGTAGGCAG
TGCCACACCTGAAACGTTTTCGGGGGGAGAGTGCCAGGGCATGTG
GGCCTGCACTGGCTGAAAGGAAAGGAATGCTCTGGGAGTTATGGC
AGAAGGGGTGGTGAGTGGCTCTTTGACCTCTGACCTGCTGGAGTC
ATTCGCCCCAGAACGCTTGGCCTGTAGCCCAGCTGGGGCCAGGGC
TCTGTGCCGCCTTCTCCCTAACGCTGCTTCTCCTTCCTGACTTTC
TCTAAATTTCTCCTCTCGGCCTCTGTCTCCCTCCCCTTCTGGATT
CCTCTCTCTCTCTCTCCCCTTTCACCCCCGACCCTGCCCTCTCCC
GTGG

[0256] In some embodiments, the intronic domain that promotes trans-splicing primarily in the brain comprises or consists of sequences from the gene GPM6B. In some embodiments, the sequences from gene GPM6B comprise or consist of:

(SEQ ID NO: 203)
GTACTTCCTTCTAATTCACCCCTCCCCCAGTTATTTCATTATCCT
CTCGTGCATATGTCTGGACCTAATTATTACATGCGCATCCTTTTA
ATTGTCATGATCTGTTTCATCCCTTCTATTAGAGTAATTTTATAC
TTTTCCCTTCAATATGCTATTTTCTGGGTGGAAACTTCAGGGAGG
CTTTTAGCTTGCTAGGTATCAAAATTTCGTTATATTTTCATGTTA
AGTGTGTAGTGAAAGAAGCTTTTCTTAATATGAAACTACTTTATA
ATGCAGTTCAATCAAAAAAGACTTCTGGATCTCCGCTACAAAAAG
ATTGTATTTTTTCTTTATTTTCAGTTTTATAACATCCAACTTTCC
ATTCAAAATAATATTGCACACATTGTATAATTCAATTAATTTGCA
CATCCAACTCCTCAAATCTGGTCTTTTTAAAATGACCAACTGCTT
AAACTTCATCTGTATTGAAAAATACAACATTAGATCCAGCCATAT
TTTA

[0257] In some embodiments, the intronic domain that promotes trans-splicing primarily in the brain comprises or consists of sequences from the gene GPM6B. In some embodiments, the sequences from gene GPM6B comprise or consist of:

(SEQ ID NO: 204)
GGCAATTGCTATTCTCTGTGAGCCAACCTGTTACGAAAAATAAAG
GTAACTTTTGAGAAATTAATATGAAGTTATAATTCAGTGGTATAT
GGAATACATCCAGAATCTATCCCATGTTAAGTAGCATGTTCTGCA
TTTTCAGAACGGCTATTTAGAAAGAGCACCTCTTGAGAGGCTGCC
ACTGATTAGCTCTGTGACCTTGGATGAGTGAGATCACCTCTTGGG
GTCTCCTGTCCTTGTTAGTTAAGAGTGACCCGAAAGGCCCTGACA
TTGCTTCGGGCACTCCAATTCTAGATCCTCTAGCTCTGGGGAATG
TGGCTGGCTCTTACTTCCCCTGCTCCCGTGCTGGCTTTTCCTTCT
TGCTACCAATGCCGGGGCGAGGGTCCCCACAATGTGTTCCACAGG
TCAGTATTGGGCCTGAAAATGCACAATCCTTCCACTTAGGGGACA
CACATCTACCTGTTTCAGTGATGATTGTCCTTCCTCTTGTTTTGG
CCTA

[0258] In some embodiments, the intronic domain that promotes trans-splicing primarily in the brain comprises or consists of sequences from the gene MIDI IP1. In some embodiments, the sequences from gene MIDI IP1 comprise or consist of:

(SEQ ID NO: 205)
CTCAGACAAGGCTTTTACCGGAAATTTAGCATATAGGATAGAAAG
CAGAGACCAAAGACCTCTTGCTTTGAGGCTGTTGGCGTGCTACAA
GGACTCGAAAGTTATTTGTTCAACGGATGACTTCTGTTTTCTGGA
GGCAAACTGAATTCCGGGCAGGTGGCTCAGCACCTCCAGCCTGTT
CCAGATCGGGACAGGGAAGGTGCCTGGGGCAATCAGTGAGGTTTC
CAACCTTCCTTAGGCCTGGGCCAGCCCGCTCCCCTCCCATGTGAC
CCCAGGCAACCATTTTAATTTTTTTACAGCCAAGCGTAGTGGAGA
ACTGGCTGCGCGCCGGTTGCCAGGGACGCGGCAGCCAGCTTGGCG
GGGCTGGGGTGAAAGAGGACGCTGCGTGGGGGAGGGCTCCGCGGC
TTCTGACTGGCTGGAGCATCAGGATTCATTTGCATAATATTTTCT
GACGGCTTCTGATTGGCTGAAGCCAGAGGGGCGGTGGTGGGGTGA
TTCC

[0259] In some embodiments, the intronic domain that promotes trans-splicing primarily in the brain comprises or consists of sequences from the gene MIDI IP1. In some embodiments, the sequences from gene MIDI IP1 comprise or consist of:

(SEQ ID NO: 206)
TGAGTTGTTGCGGGGTCTGGGGGAGCTGGGAGGCCCGGTTTGGGA
AGTTTTGCAGGCAGGTGCATGAGCCATCTTTCTCTGAAAGTGTTT
AAGAAATGTTCAAGAACAGCGGCCAGAGTCAAGAAACTGGGGGAT
GAAGGGTTATCTCGAGACTAGACGGAAGGAAACGTATCAGGGGAG
GGGTGGAGGCCAGAAGGAAGGAGTTAGGTAGGGGCCCTCTCCCAA
GCTGGCGTTTTTGCTGGGTGGAATCCTTTTGCTAGATCCCTTGGA
TTTCCGTTTTCCGTGTGTTATCACACTGTTGGAACTGGGAAGAAG
AGAAAAAGAGGCAAGATTTTGGCATTTAGTAAGTTAAGTCTGAAT
ACCGAGTTTTCATCCGGGTGCATACGTACTTAAAATACCAAATGG
GTCCAGGAAGGGGGACAAAGTACGCTTTAATTTATGAGAAGATCA
GCTACTAGAAACTGTATATCTGTTTTTCTCGAGTTTTCTTCTTGC
AGTG

[0260] In some embodiments, the intronic domain that promotes trans-splicing primarily in the brain comprises or consists of sequences from the gene SYN1. In some embodiments, the sequences from gene SYN1 comprise or consist of:

(SEQ ID NO: 207)
GTGAGTTTGGGGAAAATAGAGTGGGCAGGAGGGAAGAGTCATAAC
TACTGCAATAATATTAAATATTGGTATATTATCAGCAGTGCGATA
TCAAGAGTGTGGCTGCTGTGTGCACGTGGAGTCATGAAGTTGCTT
TGTGATAGGGTCTACCGTGAATTTCCTTATGCTTACAAGGAAAAC
TAAATCATGATCCATTCTAATATGTATCAGATCCTGTTACTCATG
TTGTCTATTTTTGCCAGTATTAAAAACCTATTTCTAATGTGAATT
GACAGAATTAATGTAATGAATCAGAATATATTACATATAGAAATT
AAGTCATTATTACTAACATTATCAAATATTCCTTCTGATAGAAAT
TTTACCTATATTCAAATTAGGATTGCCAATAACATTTATCAATAA
TAATGTTATAAATTAAATTGTTGGCAAGGCACGGTGGCTCATGCC
TGTAATCCCAGCACTTTGAGAGGCTGAGGTGAGCAGATCATGAGG
TCAG

[0261] In some embodiments, the intronic domain that promotes trans-splicing primarily in the brain comprises or consists of sequences from the gene SYN1. In some embodiments, the sequences from gene SYN1 comprise or consist of:

(SEQ ID NO: 208)
GATCACCAGGTGGGCAGAGGGTAGAAAGGGTGCACTAGGCAGAGG
GAACAGCTCACACATGTGTGCAGAGGTGAGAAACCACTTTGCAAT
TTCTGGGAGCTATGGAGATTTAAAAACTTGGTCTTTGTTTCGAGA
GTGATTGGGAGCTTCTGGGGGAACTCTCAACACTCCTACCCCTGC
CACACTAGGTCTCTGAAGCCGGATTTTGTGCTGATCCGCCAGCAC
GCCTTCAGCATGGCACGCAACGGAGACTACCGCAGTTTGGTCATT
GGGCTGCAGTATGCTGGAATCCCCAGTGTTAACTCCTTGCATTCT
GTCTACAACTTCTGTGACAAGCCCTGGGTGGTAAGTAACAGGAAG
GGTGCCACTGGCAGAGGGAACAGCTCATGCATGTATGTGGGAGCT
TGAAACCAGTCTGCGATTTGGGGAAGTGAGGGTGTTCAGAAACTT
ACAGATTCGTGGTGAAGGACTCACTGACCCAGCTCTCCTGGTTCT
CATA

[0262] In some embodiments, the intronic domain that promotes trans-splicing primarily in the brain comprises or consists of sequences from the gene PQBP1. In some embodiments, the sequences from gene PQBP1 comprise or consist of:

(SEQ ID NO: 209)
GCGTCTGGCCGCGCAGTCAGGCCACGCCCCCAGCGTAGACGCACA
CCGGCGTCGGAGCTTTCCGCCTATTACCGGGCAGCGATTGGGTCG
CTATACCGCATGTCACGCCAAGGACGCACTCTCATTGGCCAATCG
AGTTTCTGCCATTTGTTCATTGCCTCCTGAGCGTAGTCCAGTTAC
TTTCAGGCTCGGGGAGTGAAGGCCTCGTTGAGAGAAGGTCTCATT
CGGTGTTTTGGGAAGAGAGTCGTGTGGGCCCAGGTATCGTAGCGG
CGACACGAGAGAGACGGGCGGTGTGACAGCCTTCCACTACCTGCA
CGAGTGTATTGGTAACGTTGGGGTGGGTGCACTCTTTTGGAGCTG
GAGGAAGTGCTGCCCTCTGCTCCCCCATCCCAGCGCTTTGGTTTC
TCCCACCCGGCAGTCATGGGGACGCTGGATGAGCCCATTTCTGAA
GTGCGGAGGGGCCGGGCTTCTTAGGCTGTGGGCGGAGCCTGGGCC
TGGG

[0263] In some embodiments, the intronic domain that promotes trans-splicing primarily in the brain comprises or consists of sequences from the gene PQBP1. In some embodiments, the sequences from gene PQBP1 comprise or consist of:

(SEQ ID NO: 210)
TGCGTATGTTCTGTCCACCCAGCTACTGGTTCATTTGAGTAGATC
GGAGTCAGATGAGTACATGTTTACGGGAGGCGCTTGGTTACGGGA
TCCAGATAGGAATCTTTATCTGAGCTGCTTGTCAGTTTGTTCGTC
TGTCCCTAGGTCTGTCTGCTATCAGCTATGCCGCTGCCCGTTGCG
CTGCAGACCCGCTTGGCCAAGAGAGGCATCCTCAAACATCTGGAG
CCTGGTGAGACAGCTAAAAGCAGATGGTCCTAACACGTGCCAGCC
TCGACAGGCACTTTTGTTGTTGATACTGACGCTTGATACCTAGCA
TGGGCCAACTGTGCACCAAGCAATGGGGTGGCAGGCATTTTTCGT
TGTTAACAATGTGGATTCCTGACATCCATCCCTACCGCGTGTCAA
GTGGAGGGGGTTGGGGGAATAGATATTTCATTCTTTTTTTTTTTT
TTTTTTTTTTTTTTTTTTTTTGAGGCAGAGTCTTATTGTGCACCC
AGGC

[0264] In some embodiments, the intronic domain that promotes trans-splicing primarily in the brain comprises or consists of sequences from the gene CD99L2. In some embodiments, the sequences from gene CD99L2 comprise or consist of:

(SEQ ID NO: 211)
GTAACGCTGCTTTGCCTTCCTCACTTTCCTTTTGCTTCAGCCTTG
ATGCTTCCTCATTCGCCCCCTGCTCTGGCGCTTCCTTGCCGCTCT
TCTCCCTCCTGCTTCCCTGGCACTCACCGACGTGGCTGTAACCAG
GACCATCTTTAGCTTACCCTGATGCGTGTGAGAGGATGCCACCTG
CCAGACACTCTGTCCCCAGGCTGGATGTGGCAGGGGTGGGGGGAG
AGTTGAGGTGCCATGGTGAGGACTCAGGTGCCCACTGGTGGTCAT
GCCTGGGGAGCACATAGAGGGCCACCCACAGGAAGGAGACGATCC
AGCGCCCACTGGGTTGGCAGCTAGCAGTGATCACGAGGCTCAGGG
TGTGTCTCCTGGCCCCCACCTGTCAGCTGGGAAGGTGCACCTGGG
GCAGCTTCCACTGCACTCATCACCTGCCCCGCTCTGCGTGGGGCC
GGCCACACCTGCCAAAGAGCAACGCCCGCATTTGCCACAGGCCCA
TTTG

[0265] In some embodiments, the intronic domain that promotes trans-splicing primarily in the brain comprises or consists of sequences from the gene CD99L2. In some embodiments, the sequences from gene CD99L2 comprise or consist of:

(SEQ ID NO: 212)
CATGGGGCGGGATTGGGCCGGTTGGTTTCTGAGTGTGCGACTCCC
AGCTCGCCTTGCCCCCTCCGTGATCAGGAGTCTCTGGACCGTCCA
TTCCGTGGCGGGGCTGCGTGTACATCATGTCCCTGGCACCTGGCC
CGGGCCAGAATCAGGAGGAGTCCCGCAGACGTTTGTGGGGTGGCT
GAAAACACTGAGAAGCTGGGGGTTGGGCCTCCTGTCCCCACTCTT
TCCCCTGAGTCTCAGCCACTGCCACATGGAGATGGCGGTAGAGGG
GACCGGGGTGCAGAACACCAAGCTCTGGGGAGACAGCAGGAGGTG
GCTGCGAGGAAGGCCTGCCCCCACCACTGTGGCCCTCAGGTGCTC
TCGGCCTCTGCTGCTGCCAAAAGGCCCATGCTGGGGACCCTTGGC
TTCCCTTGCCTTTGCCCTCAGTGTGGAAAGCCCGCATGTTTGCTG
TCAGGAGCGCTCTTACTCCAGGGATTCTAAGCTTTGTGTCTTGCC
TTCA

[0266] In some embodiments, the intronic domain that promotes trans-splicing primarily in the brain comprises or consists of sequences from the gene L1CAM. In some embodiments, the sequences from gene L1CAM comprise or consist of:

(SEQ ID NO: 213)
GTAAGGCAGGGGCGGTGGGGAGGGGCCAACAGCAAGGTCTCCCTAT
AGACAATGTGCGCCTGGTGTGCCATTGTCCCCTGGCTGCCGGGGC
TCTGACAGGACTCTCACTTCCCAGCCCCCAGGCCCGGCAGCTCCT
CATTTCAGGGAGAGGCCAACACGCCCCAGCCCCTCCTCTCCACAC
AGATACCTTCACTGCTCCCCTCTCCCCAAGGGAGGCCCCAGACAG
CTTCCCAGACAGGAACCAGGCCCCATAATCCCCTGGCCGAGCGCA
CATTTTCTCCCTCACAGTCCCCAGGATCTGGGGAATGCCCAAAGA
TGACAGCTCCAGACCTGCCTGCCAGGGTGGCCAGAGCTGCTCTTT
CTGAGCGCATTCTAAACAAATGGAAGGCAGGCGGGCGTCTGCCTC
ACCCCCAGCCAGGCTCCTGCAGGGGCTCGGCAGTGCTCTCACTCG
CACCTGCCCTGTGCCTCTGCAGTGACAACGAGGAGAAGGCCTTTG
GCA

[0267] In some embodiments, the intronic domain that promotes trans-splicing primarily in the brain comprises or consists of sequences from the gene L1CAM. In some embodiments, the sequences from gene L1CAM comprise or consist of:

(SEQ ID NO: 214)
GCCTCTGAGCCCCACGTGACGGGGGTGGAGCCGAGGGCAGAGAGG
AGCACCTCGCCCCTTCCACCCTTCTGCAAGGCCTCCTGGATTCCC
CGAGCTCCCCACAAGATGACAGGCGCATGGTGGGGGCAGGCAGGG
GGATCATCCTCCCAGGCCGGGGTTGGGGCAACAGGCAAGTGGTGG
CTGGACCGCAGGGGGTGAGCGGTTTCTTTCAAGGCCTCTTGCCTC
TGGGCGCTGTTGAGACAGAGTGCTGGGGGTGCGGGGCGTAGAGGG
GCCTGGAGCCCCGGGTCAGGCTGGGGCGGGAGAAGAAGCTGTCCC
TCTCTGTGTCTCCAGTGAAGGATAAGGAGGACACCCAGGTGGACT
CTGAGGCCCGACCGATGAAAGATGAGACCTTCGGCGAGTACAGGT
GAGCCGGGGCAGGAGTGGGTGCTGGCACTCAGCTCCACCCTGGCC
TTCACATCTCACCCCCTCTCTCTCTTCTCTGTGCTGCCGGGTGAC
TTCA

[0268] In some embodiments, the intronic domain that promotes trans-splicing primarily in the brain comprises or consists of sequences from the gene CCDC3. In some embodiments, the sequences from gene CCDC3 comprise or consist of:

(SEQ ID NO: 215)
GTAAGTAAGCCATTTGATTTCTGCTGCCTTTGTTTTCCCATAAAA
GGGCGTTTAAAAAAATATAATTCTCCAAGAAATCTCTAGTTGTTT
TGAAATAAAAAGTTACTTTTCGCTCTTCATCTCATTTATTCCAGC
TATTCTCTGCTTTGCCCTCCTTGGTTTGTGGAGCCTCATACAAAT
TCATTAGTACTTTTCCAGCGTCACAGGTTGGAACTGAGGGTTCCA
AAGAGCAAAATGCATTTTGGCTGAAGCAGAGCCAGGAATCCATGT
TGTTTGCCATTGGCGCCATCCAATTCACTTGTTCTGAATAAGGGA
ATAAAGTTAATATTTATTCCCTTCATGATTCTTGTATTTCAAGAA
AAAAAAGTGCTCTACAGGCTTTTTCCCCCCAGCAGGTACTGATTG
ATTTGTTTGAATTTTGAGCTGCAATCAAGGATGGAGAATCTAACT
GATCTCCTTATTCACCAAATATTTATGATTTGTGCATAGAATATT
GACT

[0269] In some embodiments, the intronic domain that promotes trans-splicing primarily in the brain comprises or consists of sequences from the gene CCDC3. In some embodiments, the sequences from gene CCDC3 comprise or consist of:

(SEQ ID NO: 216)
TGATGACTATTACCAGTTTTCTCTAAGCCTAGGCCCAGCCCTGGC
CCATGGCCTCAGCCCTTGGATTGATATGGCTTATTTAGGTATTTA
AAGGTCGACACCTGCCTCCTGCTGTTTAATTCCCTGCAGTCTGAC
AGATTCACCAATTACCAAGGAGAAAGCCTGCCTTCCTTGTGCTGT
GTGTAAATGAGGCTTCCATCAGCACAGACACACACACAGGCTGCA
AATGGACCAGCCCTGCCCCCAATTCCACACCCACGGCCACAGCAA
AGAATGCTGTGTTCCCCTTCCCCAGCCCTCACACCCAGGTTAATA
CCTGGGCTCACAGCCTCAGCCCCACACCCAGGTTAATACCTGGGC
TAATTTCATTTTTTCACTTTTTGGGTTTTCAGATGTACACCCCAG
CGGAATCAAAATGACAGATTTATGTCACATTGTGGGTTTGGATCA
GAAAGCACCCTTGAGCAACACTTTGATTCTGTGTTTCTTCCCGTC
CTCA

[0270] In some embodiments, the intronic domain that promotes trans-splicing primarily in the brain comprises or consists of sequences from the gene FAM107B. In some embodiments, the sequences from gene FAM107B comprise or consist of:

(SEQ ID NO: 217)
GTAAGAATAAACACTGGGACTTTTCTATGGCTGTTGAATAATGTA
GTCCTTCTCTAGAAAATGTTGTGTGAACTTAGACTTGTTAACACA
ATAGCAGACTTGTATGAGACTAAATAAAAATTATATGTTGTTATA
GTGAGTGGTATTGAATAGTGTGTCTTTGCCAGGAAGAGAGCTTTG
TAATAGGCTGTGTCTTGTGTAGTTGTGAACTATTTTTTTTTCCTA
AAATTTCTTCAGATGCCAACCATGTCTGTCAAACTCTGGATGAGT
CGCCTTTTACTTAGCTTTTTAAGAACTCTTTTTGGATTCACTAAC
TTTTATCTGCATTATTTTATCCATGCTCTATTAAGTGTCTAGGAT
CCTGATAATTATGCATTTTCTCTGAAGATATCTATTTCCAGTAAA
ATTTGACTATCTAGTGAAGATTGTAGGCCTGATAATATATTTTGA
AGTACTTGTTATGATCTGAATGTGTGTGTCACCCCCAAAAATGCA
TATG

[0271] In some embodiments, the intronic domain that promotes trans-splicing primarily in the brain comprises or consists of sequences from the gene FAM107B. In some embodiments, the sequences from gene FAM107B comprise or consist of:

(SEQ ID NO: 218)
CGAGAACTTGTCCTCCTCCAATTGGAGGTTGACTCACGCATGCTT
CCTGCAGTCAGGTTGTGTGAGTGTTGCAACCTGGTACCCACCCAG
GGCTGGAGAGTCTGCGTGCATATTTGCTTACAAGTAGAGGAGCTG
ATTTTTGTACAGACAAGTACATTTCACCAGTGCTGCCAGCACGTT
CTCTTGGTCTGGAAGGTCAGTAACTGGTACCAGAGTTGGTACGGT
TTGTTTTTCATTGTTTGCTCTGGCTTCTGTGCCGGATGAGGTCAT
TCAGTTGCATACAGTTCCTGCTTTCAGAAGTTGCTAGAGTGTTTC
TCTTTGAACTTGAACTGTGGCTCTTTTGATATCCAGAAAGAGAGT
TCTTTGTGGGGATGGTTAATTCTTGTTTTGGGTGCTTTTCTTCAC
CGCTCTAAGGAACTACCACAGTCAGAAGGTGCATTCTTACTGCGA
TCTTTTTATTTGCTACCTTGGGCTTAAGGAGCCTGCCTATATCTA
CTGA

[0272] In some embodiments, the intronic domain that promotes trans-splicing primarily in the brain comprises or consists of sequences from the gene NEBL. In some embodiments, the sequences from gene NEBL comprise or consist of:

(SEQ ID NO: 219)
GTAAGCTGACGGCGTTTGTCGGCCGGTGTGTGTGGTCGAAAAGAT
CATGCTTGCTCTAGCTTCAGAATTACCCTCTTGAGTCATCTGACT
CCTCATCACATGTTGGTTGTGGTACCCAATTTAAAATGGACCGCA
GGTAAAGTATTATTTTTGTACGATGTGGAATGGGATTTCTGGCAT
TCACCTGGTATCATCTCAAGTCTTTTCTATTATTGGAAGCTCTGT
CTTTAATACCTTGCTAATTTTAAGAATGTTCCTCCTTGTATCACA
CACCAGGGCCTGTTGTGAGGTGGGGGGAGGGGGGAGGGATAGCAT
TAGGAGATACACCTAATGTAAATGACGAGTTAAGGGTGCAGCACA
CCAACGTGGCACATGTATACGTATGTAACAAACCTGCATGTTGTG
CACATGTACCCTAGAACTTCAAGTATAATAATAATAAAAAAAAGA
ATGTTCCTCCTTGTTAAGCAAAGAAGCAGCAGAGATATGAGTGAT
CACA

[0273] In some embodiments, the intronic domain that promotes trans-splicing primarily in the brain comprises or consists of sequences from the gene NEBL. In some embodiments, the sequences from gene NEBL comprise or consist of:

(SEQ ID NO: 220)
AAAAAAAGTATATTTTGAAGTATAAGTTTTTGTAATTATATTAAA
AGTGGTATATATTGTTACCTATAAAATTTCAAACTGATTTTAAAT
AATGCCATTTTCATGAATGATTGCCTGGAAATAGATATCACTTTA
TTGCATACTGAAGTTGAAGAGATAGGAAATTTAATTTATATTTAA
ATTAGTATATTTTAGGAAGTAACCAGGATTTGAGAATATGTATTT
TTACAAGCTCTCATTAATAATATATATATAGTTTTATATATAATT
TAAAATAGATATGAGCTATAATGATTAAAAACTTTGTGAAAATAT
CAGCACTTGATTTCTGATGCTAAGAAACTGAAGTTCCAGACTTTA
GTTTTGGAGTATTTGGAAAAGATACATACATGTAGACAATCTGCA
CGCAGCCAGTGCAGTGTACACCTGTCATTTAATAAAAATGTTGTG
AAAGAGGTAACTATCCGCAAAATTCAGTATGATGATTTTTCCTTT
TTCA

[0274] In some embodiments, the intronic domain that promotes trans-splicing primarily in the brain comprises or consists of sequences from the gene HNRNPF. In some embodiments, the sequences from gene HNRNPF comprise or consist of:

(SEQ ID NO: 221)
GTGAGGGGCGGCCGAAGTCTCCGAGGTCGAAGGCCGCACACCCGG
GACCTAGCGGGGACCGGGTCCCCCTGGGGGTGGGGACGGGGGGTG
GGATTTGAGATTAGGGAGACTATCCGAAGTCCAGGGCCCCGTACC
CGGACTACCTGGGGACTGGGCCTATTGGGGTGGGGATCGTTGGGC
TGGGGCTGGGATTTGGGATCAGGGAAGAGCGATCTGAGTTTAAGC
GCCGCAAACCTGGGACCGAGCGAGGACTGCACATAATGAGGGGCC
GTGGCGCTGAGATTTGGGTGACGGGATTCGAGGTCGAGGGGCCCG
TACGTGGGACCGGCAAGAACTGGACCCACTGGGATCGGGAGACGC
AGCGTCGGAGGTCGAGAGCCGCACGCCCAGACAGTGGTCCCACGC
GGTGAGCACCGCGGGCTGAGATTTTGGAGTCAGGAAAGCGCGGGG
AAGGCACGGACGGCCGGGTGCGTTAGTCCGGCCCCCTGGCGGGGA
GCTG

[0275] In some embodiments, the intronic domain that promotes trans-splicing primarily in the brain comprises or consists of sequences from the gene HNRNPF. In some embodiments, the sequences from gene HNRNPF comprise or consist of:

(SEQ ID NO: 222)
CCCTATCCCCTCCCCTCCCCTCCCTTCTCCTCTCCAGAAACGTCC
TCGCTTGTCCGCCTCCACCGCCTCCCCCGCCAGCCGTGTCGGCTC
TGCTCCGCGCCCAGCCGGCCAACCGGCGGCTCAGCTCTGGCGCGT
CACAATGCGCCGTCGCGGCCCCGCCCCCGGACGCCGGACGCAGAA
ACTCCGCCCTGCCGCGGTCCTTGCGTCCTTCCGGCTCCGTCGTGG
AAGCAGGACTGCGCCGCGTCTTCCTCAAGGTGGGGTTCGGGGGGC
CACCGAATCGCTGTCACGCCGGCAGGTAGCAGGGGGTGGGGACGC
GGGCTCCTTGGGCTTCTGTTTCCTGGTGTCCAGGGCAAAGGGCTG
AGCCGGGCAGTAGGGCCTAGTCGGGGCCTGGCTCGCCGGGAGCAG
GAGGGCTTCCGGCAAAGCCGCGTGCGCTCGACGGGCAGGCGCTGA
GGATTGGGGCCGGCAGCGCGCCTGACCCCGCCCCTCGTAGGCTCC
GCCC

[0276] In some embodiments, the intronic domain that promotes trans-splicing primarily in the brain comprises or consists of sequences from the gene FAM213A. In some embodiments, the sequences from gene FAM213A comprise or consist of:

(SEQ ID NO: 223)
AGGGAGTGTGGGTTGAGGGAAGCCACCGATGTGGCAGAAAAGGAA
GGGAAAGCAAAAGGAGGTAAAGAATAGACAGCAGATGAGGGGCCT
CAGAGGTGCCAGCTGACTTTCCAGGCCTGGGGTGAGGAATGGGGC
AAGGGAGCAGGCTGCACGAGGAGCCACAGAGAAAAGGACATCTTC
TTTTATTTGCGCTAGTATGACATGTGGGCTGTGTTACGAGCTTTG
CTTCTTTAGTCTGCACCGGATAGCAGAGGAGTCTGGTGGCACTTG
GGAAATGTTATAATCTGCATGACTGCAAATGACTCAAAGCTTTGC
TCAACTTTTTGAAGGGCTAGGGGGCCTTGGCAGCTTTCCATTTAG
ATGTTTTCTGGAGACTGACTGTTGGCAGCTGAAGGAGCCCCAGGG
TTTCTGGGTGGCCTGGTCCTGCCTATGGAGTGACTGAGCCTAGGG
ACCTAGTCCCGCCTCCAGCCCTCCCCTTGCCGCCTGCCCAGGCCC
GTCT

[0277] In some embodiments, the intronic domain that promotes trans-splicing primarily in the brain comprises or consists of sequences from the gene FAM213A. In some embodiments, the sequences from gene FAM213A comprise or consist of:

(SEQ ID NO: 224)
TGAGTGCCTTGTTCCCAAGTTTGAAGCGTCTGAGGTTGGGGGTAA
GAGACCGTTTGAGGAAGGGAGTTGCCTTGTATAGGAAAGAGACAG
GGTCTCGAAGCTGGAAACTGAATTTGGGGCGGTGGGGGCAGTGTT
GAGGAGCCTAGAATGTTCTGACTCCAAAGTGACCTGTTTTTGTTA
GACTCATAGGATGTCACTGGGGATCATTAGGAACTTCCTCATGGA
GTTGAGAAAAATGGGGCCTGGGGAGGAATTGATTCAGCTTAGCCT
AGGGAGCCCGACTGGGTCTCGTCCTCTTGCACCCATGTTCAGACC
AGAGCTGCCACTCTGAGCTGCCACAGCTGTTGTTTGTTTGTGGCT
TTATCCTACTTCACCTTCTGTGGGAGAGGGTGGATCAGATAAGCC
CAGCAGTGGGGAACTGAATGCTATAGCTGTGTCAGGTGGGGGCTG
GCTCTTCTGTAAACAACCCTACTATTCTGTTTCAGAGAAACTGAC
CCTT

[0278] In some embodiments, the intronic domain that promotes trans-splicing primarily in the brain comprises or consists of sequences from the gene NDUFB8. In some embodiments, the sequences from gene NDUFB8 comprise or consist of:

(SEQ ID NO: 225)
GTGAAGATGGCGGTGGCCAGGGCCGGGGTCTTGGGAGTCCAGTGG
CTGCAAAGGGCATCCCGGAACGTGATGCCGCTGGGCGCACGGACA
GGTCCGCGAGAACGGGCGAGACCTCAGTGTGGGAAGGGGGTACCT
GAAATTTGGTGTATCGGGAGGGGGGATCGTAGATGCCGCGGCGGC
AGCCTCCGGGTAGGGAGTGGAGGTGGCGTTGATATATCCAGAAAA
TGGGGTGGAGGATCGCACTGATCCTGCGAAGTCCCGGGCTCGGAC
CTCTGCAGCCCCTGCGACTTGAAGCCTTCGGAGCGGCTGGAGAGC
GGGCTCGCTTCTGACCTGTTCTCTTCTGCGTTCTAGCCTCCCACA
TGACCAAGGACATGTTCCCGGGGCCCTATCCTAGGACCCCAGAAG
AACGGGCCGCCGCCGCCAAGAAGTATAATATGCGTGTGGAAGACT
ACGAACCTTACCCGGATGATGGCATGGGGTGAGACAGAGAGGGTA
TGCT

[0279] In some embodiments, the intronic domain that promotes trans-splicing primarily in the brain comprises or consists of sequences from the gene NDUFB8. In some embodiments, the sequences from gene NDUFB8 comprise or consist of:

(SEQ ID NO: 226)
TGGGTTGAGGTGACTGAGACATGCAGATGGAAACACGGACTGAAA
CTAAGGAGCCAATTCAGGGCCGAATTGTGTGTTGCACTGGCGTCT
AAGTGAAGATCAACCCATTTGGAGAACAGAACAACAAGCAAGACC
AACAGGTGAATTTGAAGAATGATCATGTTTGGGGATGGAAGGAAG
TGCCCGTGAAGGAGAGGAAAGCAAGCAGCCAGAGAAGAGAGTAAG
ACAGGCTCATTTCACTAGTACAGCTCCTGGGGGAGGTGGTTAAGC
TGTCTACCTGAGTTGCTCAGGTTCCGAGTTCCCATCATCCCTGGA
TGGGTCTAAGTCAGCTCAGGGAGAAAAAGGACACAACATTCTGAA
ATGTCAGAGACCTGCCTGGTTTTCCCTTCTTCCCGCTTATCCTTC
CCAGCCTCTATCCAACCCTTGGCTTCCCAACTGCGTATTTAAACC
CCGCCCCTGTTGAACCCTTCGGCTTTTCTTCACTCCCGGCTTCCT
CCGT

[0280] In some embodiments, the intronic domain that promotes trans-splicing primarily in the brain comprises or consists of sequences from the gene PSD. In some embodiments, the sequences from gene PSD comprise or consist of:

(SEQ ID NO: 227)
GTGAGTGCCCTCCTCCTGCCCATCCCGGACCCCTTCCCCCACCTC
CCATCCTGCTCCCCTCCCTGTCCCTGGATTTTTTCATTCCTTCTC
AGGCCACACTTGAGCCAGGACTGGCATCCTGGGACAGAAACCCTG
GGCCCAGGTCCCAAAGGGCTGTGCTTTCTCCCCAGGAGCCTGGAG
CAGATGCAGTCCTGGATCACTCGCATCAATGTAGTAGCCGCTATG
TTCTCTGCGCCCCCCTTCCCAGCTGCTGTTAGCTCCCAAAAGAAG
TTCAGCCGCCCTCTCCTGCCCAGCGCTGCCACCCGCCTCTCCCAG
GTAGCCCAAGCTCTGTCCACCTAGTGCCAGTGGGATGGAGGGTGT
TAGGCTCAGGCCCACTGCACTCAAGGCTGCTGCGTGTGATCGTGG
AGATGTCCCCTGCACCAGGATGCTGGCCACAGGGGTGAGCAGGGA
CTGAAATCCAGCCCCCACTGGGTCCCGCTTGCCGGCTGGGAACCC
AAAC

[0281] In some embodiments, the intronic domain that promotes trans-splicing primarily in the brain comprises or consists of sequences from the gene PSD. In some embodiments, the sequences from gene PSD comprise or consist of:

(SEQ ID NO: 228)
GAGGTGATCACACCTGCAGAGACGAGGAGGAGCTGAGACGCTCTC
TGTCTGAGTTGGCCGACCCCAACCCCAAGGTCATCAAGCGGATCA
GCGGGGGCAGTGGCAGTGGCTCCAGCCCTTTCCTGGACCTGACTC
CCGAGCCTGGGGCTGCCGTCTACAAGCACGGGGCCCTGGTGCGAA
AGGTGCACGCAGACCCTGACTGCAGGAAGAGTATGTGGCCGAGTT
GCGGGGGGCGGGCGTCTAGGGGATGGATGGGAGTGGGCCTGTTCC
AGGGCCCCCTGACCTGTCTTCTCTCCCCGCAGCACCTCGGGGCAA
GCGGGGCTGGAAGAGCTTCCACGGGATCCTCAAGGGCATGATCCT
CTACCTGCAGAAGGTGCGGGGTCAGGCCAGGGGGCTGGGGCTGGG
ACTGAGTTGGCTGGTGGGTGTGGGGTGATGGGTGGGAATAGGAGG
GGCTGGGCCAGGCTGCATTTGGGGCCAGGACAAGATGGACACCCC
TGCA

[0282] In some embodiments, the intronic domain that promotes trans-splicing primarily in the brain comprises or consists of sequences from the gene GSTO1. In some embodiments, the sequences from gene GSTO1 comprise or consist of:

(SEQ ID NO: 229)
AGAGGCCCTCCCAGTAGTCACGTTAAGCTAGTACTGACAGAAAAA
GGAAAAGCCTGTCCAGGTGGCTGGGCAACCCTGCAGCGAGGCATA
GATGAGCTTGTAAATCAAAGGAAATGACCAAGGTGAGTCTCAATC
CTTTTAGAGGTTTATTTTGCCAAGGTTGAGGACACATCTGAGAAA
AAGGAACACAAAATCACAGGAACATCTGTGATCTGTGCTCTTTCC
AAAGAGGGCTTGAGGACTTCAATATTTAAAGGGAAAGAGCAGGCA
GTAGGGGAAAGTGGAAAGTAAAAAGGGAAGGTAGATAAAAGGGGA
GAGTAGTTGCATTCTTTGGGGCCTTTGATCAGCATTCACTGAATG
CGCATGTTACATTCGTGAAAGGAGGTCGTAGAGGAATAGTCAGTT
ATGCATTCGTCTAGTGCTTGGTGAATCTGCATTTTTACAAGATTA
AATATAGGGTAGAGGAAGCGGTCAAATTGCATTTTTCTCCAGCGA
GAGG

[0283] In some embodiments, the intronic domain that promotes trans-splicing primarily in the brain comprises or consists of sequences from the gene GSTO1. In some embodiments, the sequences from gene GSTO1 comprise or consist of:

(SEQ ID NO: 230)
TGAGTGAGCCATGAGGTCGGGCCACAGGCTCTGAAGTCGTGAAGC
CTTGGGACGGAGCGGGTGGTGCTTCGAGGTCAGTGTCACGGGAGG
GAGGTCAGGGTCAGGGTCAGACGTGGAGCCCCGTGGAGTGCGGAG
TGGTGACCCCTTCGTTCGGGGGCGGAGGGATGACTGAGCATTTAT
AACTTTTGTGTATCTCCCCGTGGGTGCAGCCCTTGGCCAGCGAGA
TGCTTTGACACAGCCCCTTAAGATGTTTTAAGGGCTATCCCATAA
AGCCGGGAAGGCACAACGGGTGGAGCTGGCGGCCGCCGGGGGCAG
GCACTTTTGAGCTAAGGAGGAAGCGGGGGAGGGAAGGAGGGCGGG
AAGGACGCGCCACCTACTTCCTGAATCCCCTGCAAACCCCAGAGG
AGCTCGGCCTGCGCTGCGCCACGATGTCCGGGGAGTCAGCCAGGA
GCTTGGGGAAGGGTGAGGCCTGCCCGCCGCGAAGAGGGGGTGATC
TCGG

[0284] In some embodiments, the intronic domain that promotes trans-splicing primarily in the brain comprises or consists of sequences from the gene TACC2. In some embodiments, the sequences from gene TACC2 comprise or consist of:

(SEQ ID NO: 231)
CGTATGCCTTCCTGCAGGATTTCTCTGTCTTCCTGTCCCACTCTT
GACCCTTGCTTTAGCCACACTGGCCTCCTCGCTGTTTCTGTAACG
CACCAGGTGCTCCTGCCGCAGAGCCTTTACTCGCACTATTCCTTC
TACCCAGGATGCTTCCTCCCCAGGAGTCCTCCTGTTTCATGCACT
TACCTTGATTCTGGCCTTTGCTTAGATGTCTCCTCAGAAGATCTT
GCCTGACTACCTTATTTTAAAAGTGAAACTCTCCTATCCCGGCTT
TATTTTTCTCCTTAGCATGTATCACCCTCTGAAATTCTGTACATT
GTTTGTTTGTTTTTGAGACAGAGTCTCACTCACTCTGTCACCCAG
GCTAGAGTACAGTGGCGCAATCTCGGCTCTCTGCAACCTCTGGCT
CCCAGGCTCAAGCGATTCTCCTGCCTCAGGCTCCGGAATAGCTGG
GATTACAGGCGCTCACCACCATGCCTGGCTAATTTTTGTGTTTTT
TTAG

[0285] In some embodiments, the intronic domain that promotes trans-splicing primarily in the brain comprises or consists of sequences from the gene TACC2. In some embodiments, the sequences from gene TACC2 comprise or consist of:

(SEQ ID NO: 232)
TGTGAGACACCATGCCCGGCCCTGGTGGTTTATTCGCTATCTTCC
CCTGAAGAATGTGACTTCCAGGAAGGGAAAGGTTTTGTCTATTTC
TGTTCCTTGTTGAATCTCTAGTACCTAGAACCATGTCTGGTCCTG
ATTAGGCACTTGGTGAATGTTTTTGAATGAATACTCTGAGCTGTT
CTTTAATCGGTCCTCATGATCCTCATTGTACAGATGAGGGAACTC
TGGGCGAACCTGGCCTGGGTCTTGAGCTAATTACGGGTAGGTCAG
GTTCTGTACCCAAGTAGTACACACAGTGATGGGCGGGGTGGCCTG
GGGCCGTGGTTTGTCAACCCCTACGCTGGAGGGTGATGTTTTGGT
ACAAGAGGAGAGGTGCCCCAATGCGTCCTGTGTCTGTAATTGATG
GCGTTGTCTGTGTTTCCCCAGGATGTGGTTCTGAGACAGTCCCTG
TCCCTGATGGCCCACGGAGCGACTCGGTGGAAGGAAGTCCCTTCC
GTCC

[0286] In some embodiments, the intronic domain that promotes trans-splicing primarily in the brain comprises or consists of sequences from the gene TM7SF2. In some embodiments, the sequences from gene TM7SF2 comprise or consist of:

(SEQ ID NO: 233)
TGCCTAGGGGACGGGCCCTCGCGCTGGAGTTAAGCGGCCGGGGGT
GGAGCTCCAGGCCTAGCGGGGAGGTCCACGGAGATTGGCCCCCAC
CCCAGGCTCCTTTGTGTGCCTCTGTTACGCCCAGGACAGACGCCG
GGGGCTCTCCCTATGCCCCTCGTCCCCACAGCCTTACCCCATTTA
CTGCTACTCCGTGCACCACAGCAGTGGCTGGGGTGATCCTCTGAA
GGCCAGGGTGGCAGCCTAATGCTTGGGGCAGGGTCTGTGGCCCCC
CTGAGTTTTGGGCTCTGCGTGTGTTTGCGGGGTGGGGATGTGGAG
GCGCGCAGCCCCAGGGCTCACTGTGCGCTGTGGTTCAGGCTTCCA
GGCCCTGGTGCTGACAGCCCTGTTGGTGGGGCTGGGGATGTCAGC
GGGGCTGCCTCTGGGGGCGCTCCCGGAAATGCTCCTGCCCTTGGC
GTTTGTCGCCACCCTCACCGCTTTCATCTTCAGCCTCTTTCTCTA
CATG

[0287] In some embodiments, the intronic domain that promotes trans-splicing primarily in the brain comprises or consists of sequences from the gene APBB1. In some embodiments, the sequences from gene APBB1 comprise or consist of:

(SEQ ID NO: 234)
GAATAGGGCTTGGGATTCGAGGGTGGGAGTTCATCCAGCATCAGA
GTCCTCCTCTCTAACTCTGTTATTTGCCTCTCTTGTGCTGCTGGA
CCCAGAGAGAGGTACTATGCCTATTTTCCCCCTCCTACACCTGGA
CCAGATGCCTGGAAGCACCCAAGCTCCCCTCTTCTGCCCTGCCCC
TTCCCACCCGCTATGCTCCACCATTACCCTCCACCTCAGCATGCT
TGCCTGTCTACCCCTCCCCCCCAAGAAGGCAGCACCTATGGGGGA
CCAGCTGTGGGCAGAAGCCCTGGAGGAGCTGTGATGGGCAGGGAG
GACGTGGGTGGGGTGGGGACCAGGCTCAGCACTGGATGGTACTGG
GAGACACTGAGGTGCCCCTTCCCCAACAGGGACTTTGCCTACGTA
GCTCGTGATAAGCTGACCCAGATGCTCAAGTGCCACGTGTTTCGC
TGTGAGGCACCTGCCAAGAACATCGCCACCAGCCTGCATGAGATC
TGCT

[0288] In some embodiments, the intronic domain that promotes trans-splicing primarily in the brain comprises or consists of sequences from the gene APBB1. In some embodiments, the sequences from gene APBB1 comprise or consist of:

(SEQ ID NO: 235)
GGGGAAGTAAGGACCTGAGCCGGGGGTAGGGGGTGGTACTGTGAG
AGTGTGAAGGGAATTATGAGAGATGGGAGGTCTGACCTGCCCACA
AGCAGGCTGGGGAAGGGGGATATTGGCCCATCCTAAGTGGCAGCC
CTGTGGGATGGATGAGCGACCCCAGGCCAGGACCTTGGGAGATAG
TCGCCTAACAACGGTGGAGTCAATGTGAGAGATGACACGTGACCT
CCACTAGAGTGAGGCCTGCAGGGCGGGCGGTCTGACACCAAAGCA
GGGGCCCCAGAGCTGTGGCTAACATCCCCTGAGCTGCAGGGGTCA
GAGATCAGCCACCATCCTGGCTGGAGTCCCACTGAGTGCCTGCTT
CTGGTCCTGCAGGGAAAGGATCTGCTACTGCAGCTGGAGGATGAG
ACACTAAAGCTAGTGGAGCCACAGAGCCAGGCACTGCTGCACGCC
CAACCCATCATCAGCATCCGCGTGTGGGGCGTCGGGCGGGACAGT
GGAA

[0289] In some embodiments, the intronic domain that promotes trans-splicing primarily in the brain comprises or consists of sequences from the gene EIF4G2. In some embodiments, the sequences from gene EIF4G2 comprise or consist of:

(SEQ ID NO: 236)
GTGGCTAAACAAAATGTAATTGTCAGTGTTTTGAGTACATTTTAG
GTTAGTCTTACAGATCTGCAATGCAGTGACAGTGCCAGGATCTGA
AATACGTTGTAATTGAATGAAGGCTTATAGATCTGTATGTTAGCA
GTGTCTAATTTTGGTGCTCTTTCTCGTTCCAGGTATTTCATTTCT
CCTGTCCCCTCCCCTCCCCACCCCATCTATTAATATTATTCTTTT
GAAGATTCTTCGTTGTCAAGCCGCCAAAGTGGAGAGTGCGATTGC
AGAAGGGGGTGCTTCTCGTTTCAGGTACTTGTAGATTTATTTTGG
GGAATCCTTTTGAAAAGGCCAGTCTCAAAAAGTAGTTAACACAGC
AAATAAGTCCGACTTAATGGGCTGCAATTTTCATTTGAAAAGTTC
TTAAGTTTTCATTGACAGCCTTCTAAGAACTGCCATCTGAAGAAT
AAATAAAATCAATTATTTGCCTTTCCTTTGGGTCCGAGTTCAGTC
TTCA

[0290] In some embodiments, the intronic domain that promotes trans-splicing primarily in the brain comprises or consists of sequences from the gene EIF4G2. In some embodiments, the sequences from gene EIF4G2 comprise or consist of:

(SEQ ID NO: 237)
AGTGTTGGCCAGGCCGCCGTGCGGTCATGGCCGGATGGCCGACGC
CTGCAGGGACGAGGCCGTGGCGGACCGAGGCACGGCTGTGCTCGG
ACGGCGAGGGAGCGTGGCTCGGACCGCTAGCGCCGTGGCGGGAGG
CACGCGGGCCGGCAGGGAAGGCCAGGCCGTTGGCGCGGGACCAGG
GAACCGCAGGCGTCCCGGAGCCTGGCCTCCCGGCGGGGAGGTGTG
TAGGACCTGGAGTCGGCAGGGGCTGCCCTTCGTCGGGGAGGAAAG
AGAGAGTGATGATTTCTGCCCCTTTTGTCAGCAGAGGAGGCCGTG
GCGAGGCGGTTGTCAGTCCCGGGGGGATTTATGGTGCAGGAGGGG
GCCCGCTTGGAGGCGGCGGGTGGGCAGGAGGCCGCCTTCCTGCTT
GGAGAACAAAGAGCTGGGCGCCGGGCTGGCGGGGGTGGCCTCAGC
TGCTCCTCCCCGTCGAGCGACCCGGGCCTCGCGGGGAGGTTGTCG
GAAG

[0291] In some embodiments, the intronic domain that promotes trans-splicing primarily in the brain comprises or consists of sequences from the gene SYT13. In some embodiments, the sequences from gene SYT13 comprise or consist of:

(SEQ ID NO: 238)
GTAGGGGTCTCCTGCCCCCTGCACTTCCATGGGCAGCACTCCAGT
GGGGCTTGTCAATGTCTCTGTAGATGCTGTGTGTGGCCTGATGAG
GAGGCCGAGTGCCCCGGCATTTGACGCTGGCCAAGCAGATGGGCA
CTGGGCCTCAGAATTATGGTCCTTTCTTCCTGACAACATGTTGCC
ATACCACTTCTCCCCCAGACCGCCAACTTTCCACTGGAAAATGGA
GTCCCTTTCTAGTCATATGTGTGCAACTATGAGAGAGGATAAAGA
GCCATGGTTAAAACCATGGGCTTCAGAGTCAAGGGTTTAATTTGC
TGCCCTTTCATACACTTATTGTGTGGCATGGGTCATGCTGTAACT
CCATGAACCTCGGTTTCTTCATCTATAAAATGAGACTAGACTATT
ATCGAGCCTGGCACAAAGGAGGTAACAAAAAACAT

[0292] In some embodiments, the intronic domain that promotes trans-splicing primarily in the brain comprises or consists of sequences from the gene SYT13. In some embodiments, the sequences from gene SYT13 comprise or consist of:

(SEQ ID NO: 239)
CAGGGAGCTCAGTGACTGGAGATGAGCAAAGGAAGGATTGGGGGC
GATATCAGAGAGATGAGCAGGATCAAGCTAGGCAAGCTGCAAGGA
GTCTGGATTTTGTGTGGTGGGAGCCACTGGCATTTCTGAGCCATT
AGGTGGAGAAGAGGAGGGAGGAAGGGAGAAGGGAGAAGGAAGAGG
CAAGGGGAGCAGATGAGAGCAGCAGAGTGGGGACCACCTGCAGCA
GGTCCAGGCAATATCCATGGGCGCAGCCATAGGATGGATGGGCCG
ATGGATGGAGGAGGTATGGATGAACAAGGCCCACATCTCAGTGGA
TTGTGGATTTGAGTGGGTTTGGAGATGATGTTAGACCTTCCTAGG
TTGTGCTCTTCAGAGCAGAATGAAACCACAACTCTCCCTCTGCAT
CCTACAACAGGTCAGTTCACCGTTTCTCCCTTCCATGGGGGGAAA
CAGACAAGAGGGCTCCTTTGTGGACTAATCAGAGTAATTTGTGTT
TGCA

[0293] In some embodiments, the intronic domain that promotes trans-splicing primarily in the brain comprises or consists of sequences from the gene MAPK8IP1. In some embodiments, the sequences from gene MAPK8IP1 comprise or consist of:

(SEQ ID NO: 240)
CTGCTAGGTGAACGTGTACTCCAGATCTCAGCCAGCCAGGTGGGG
GGCTGAGTGGAAGTGATTTTAGGTCCTTTTCACGATCAAGCAAAG
TGAGGCCCGGCCAAGTTGGGCAGCCAGGGATTGTGGCAGCCTCTG
TGGGCTCTGCCATTCCCCGTGCCTCACCCACCCTCCTTCACTTGG
CTGCTCAGCTCCCTCCTGCTCTTTCTGCCCCTCCTCAATTCACGC
TTGCTTTCCAGCCCTGGCCAAAAACAGTGACTGGGTGGACCAGTT
CCGGGTGAAGTTCCTGGGCTCAGTCCAGGTTCCCTATCACAAGGG
CAATGACGTCCTCTGTGCTGCTATGCAAAAGGTACCTGAGCCCTC
TCCCTTCTCCTCCCTTGGATGGGTCCCTGGGGCAGAGGGACGCAG
GTGTCTAGAGGCAGTAAAGGGCTCAGGCCCTGGGACAGGAGGGAT
CAGCAGAGGAACAGACAGCAGCTGACGTGGCTCCATTTGTCACCT
GTAG

[0294] In some embodiments, the intronic domain that promotes trans-splicing primarily in the brain comprises or consists of sequences from the gene MAPK8IP1. In some embodiments, the sequences from gene MAPK8IP1 comprise or consist of:

(SEQ ID NO: 241)
TGACTTCTTCCAACCCAGCCCCTTCCTTCCATGGCCCCAAGCTCT
CCCCCAAGACTTGTGATGAAGAGGCCATCTCCTGTCACCCTCACT
GCAGGCCAGGTGACCGCCCTCTTGCTTCTTTTCTCCCTCCTGTAG
GGGAATAAATGTAGCCACTTTTTCCAGTTAAAAAACATCTCTTTC
TGCGGATATCATCCAAAGAACAACAAGTAAGTGGGGGTGGGATGG
CAGTGGAGGAGGCACGGGTGGTCTGCAGCCTTGAGGTGGGTGGGT
GTGGGCCGAGCCCCCGTCCCAGCACAGACAGACCTGTCCCTGCAG
GTACTTTGGGTTCATCACCAAGCACCCCGCCGACCACCGGTTTGC
CTGCCACGTCTTTGTGTCTGAAGACTCCACCAAAGCCCTGGCAGA
GTCCGTGGGGTACGTGTACACCCTGCTGAGCACCCAGCCCGAGGG
AGCACGCCCAATCCCAGGCCCTGGGGCTGCTTCCTGGCGCTCAGC
TTTG

[0295] In some embodiments, the intronic domain that promotes trans-splicing primarily in the brain comprises or consists of sequences from the gene UBE2L6. In some embodiments, the sequences from gene UBE2L6 comprise or consist of:

(SEQ ID NO: 242)
GTGAGTCCCGGGTCCGAGCCTTCCGCGCGGGGATCGGGCGGTTGT
CCGGCGGGTCGTCCTTCGACGGCCTCCTGGCCTCGCCGGAGCGGG
TGCGGGGAGGCCCACGCAGCGACGGCTGGAGGAGGGGTGGGCGGG
GCTGCCGGGGGTGGGGTCCCCGGGGCGGGGCGGGGCGCGCTGTGT
CGCGGGTCGGAGCTCGGTCCTGCTGGAGGCCACGGGTGCCACACA
CTCGGTCCCGACATGATGGCGAGCATGCGAGTGGTGAAGGTAACC
GCGTATAGGATGACCCCTTTCTCTTGGCTCCCCTCGCCTCCCGCA
TTCCCTCCTCCCTCCATCCCCTCCGCGGCTCTCCGAGCACATTTA
TTTATTTGTCTGGGCACCAGGGCTGGCTGAATCCCTGTCCTCCCC
GCCCTCTACTCAGAGGAGGACTGGCCTGCAAGAGTGGCCAGAGCT
GGGGTTTTGGGGGTTTGGAGGCCTCTGCTTGAGCCGTTCGCGTGG
TGAA

[0296] In some embodiments, the intronic domain that promotes trans-splicing primarily in the brain comprises or consists of sequences from the gene UBE2L6. In some embodiments, the sequences from gene UBE2L6 comprise or consist of:

(SEQ ID NO: 243)
CTCCAGTCAGGGCGACAGTGAAACTCTGTCAGAAAAACAAGAAAC
AAAAAAACTGTGAGGTACTGAGATCACAAACTGGTGCTCAAAATA
TACTGATTTCCTTTCTCGTCTGGACTAAACGGGGGTAGGGAAGGG
TGAGAAGGAGGGGATCGGCCCTCCCAACAAGTCTCATCTTCCCCA
GATGCTGCTTGGTGCTCAGGGGCTGCAAGTACTCTGTCCTTGCAC
AGAGGGTTGGGGACTCCAGCTGTGCATGGGGGCACACATTAGGCC
CACAGCTTGTAATGGACCAGTAGTAAAGTAAGGGAGGGGAAGCAG
ACTCTCTCTTGGAAAGGAGGCTCCTGAGTCCTTCTTGGGGCTTCC
CCCACCAACTGTTTCCCAAACCAGCATACAGTAGGCACTTAGTAA
ATACTAAACCTAGTAAAGGACTGAATGATGGTAGACCGAACCCCC
AAAGCAAAAGAGAAAGGGTCCAACAGCGCCTCCTTGCGGTGCTCT
GCCC

[0297] In some embodiments, the intronic domain that promotes trans-splicing primarily in the brain comprises or consists of sequences from the gene CPSF7. In some embodiments, the sequences from gene CPSF7 comprise or consist of:

(SEQ ID NO: 244)
GTTTGTCGGGAGGGAGCGGGGCGGGCCTAGCTGGGGGCGAAGAGT
AGGCCTGGGTTGGGGGCAGAGGCGGCTGGAGCTGCTTGACACCTG
GGGGCTCTGGCCGGAGCCGCCTTGGGGGCTAGGCAGGTGCAGCGG
ATAGGGGCTGCGGGCTTCGCCGCGGTCATTCTTCGCAACGCCGTC
CTAGGGCCACTAGGACCCGAGGGTGGGACTTTTCCGTCGCGCCAT
AGGCAGCTGCGGCGCAGACGCGGCGCTACCCGGGTCGGGCCCGAG
GGTGATGGGCAGCGACCCCCGGCGGCCTGGGAGAGCGGTGGGCGG
CGCGAGGCCGGGGGCGGGGCGGAGCGGGTGGGGCCGAGCTGGGGC
CGCCAGGATGCTGCGTCTCTGGAGATGGGAGGTTAGCAATCATTA
CCCTCTTCCCAGCCCAGGACCCTCGTGCCTTCTAATTCTTGCATT
TTTCCGAATCCCGCAGTGGCATCTTCCTTACTTTGTCCATCCTCC
GGAC

[0298] In some embodiments, the intronic domain that promotes trans-splicing primarily in the brain comprises or consists of sequences from the gene CPSF7. In some embodiments, the sequences from gene CPSF7 comprise or consist of:

(SEQ ID NO: 245)
CGATGACTGATCGTTTAAGCAGATATTTCCAGACCGGCACACAGT
AGGCTCACCAAAGAATGGAAGCGACCTTTATTTCCTGAGTTGCAG
GATCGGCCTCTCCCTGGGCCTGCCCTTGCCCTGCGCTATCGGGCA
GACGAACTCTCCCCAAGATAGAGACCACAGAGGAAGACAAAGGGT
AATCCCCGCTGCCGCCCGCCCCGGACGCTAGAACGTTCTCTCTCC
TCACCAGCGACGAAGTCGAGAACACTGTAGACACCGCCATTTTCC
CCACCTGCACCGGAAACCGGCTGCGCGGGCACTTCCGGGAACTCC
TAGCCGCCCGGCCAGCCGACCACGGCAGCCACGGAGGAGCTGAGC
CGGAAGGTGCGTCCCTGCGCATGCCGGAAGTGGCGGTGCGTGTGA
CGCCGGCGGCGGGGGGGGCGGGACCTGGGGCGGAGAGCGGTTCGC
GCGCTTCGGGCCTAGTCCGGACTCGCCGCCGCCGCCGCCATATTC
CCGG

[0299] In some embodiments, the intronic domain that promotes trans-splicing primarily in the brain comprises or consists of sequences from the gene BSCL2. In some embodiments, the sequences from gene BSCL2 comprise or consist of:

(SEQ ID NO: 246)
GGACCCTCCATTTTCCATATCCAGGAAAATGTGATGCGCCACAGG
TATCAGCGTCTGGATCGCCACTTCACGTTTTAGCCACAAGTGACT
CAGTGGAAGATCCAGAGTCAACAGAGGCTCGTCAGGAAGATGTCT
ACAGAAAAGGTAGACCAAAAGGAGGAAGCTGGGGAAAAAGAGGTG
TGCGGAGACCAGATCAAAGGACCGGACAAAGAGGAGGTAGGGGCC
CTTGTGGGGACAGTCAGCAGAAATATACTGGAAATAGGTGGGCTG
GCGTGAAGGGGGCGGGGGGATGGATTGGTTTTAAGAATTTCATTC
ATTTTGAATAGATTACTTCCCACGCCCGCAGCAGTGTGCAAAGAT
GTACACAACACTGGCCTTGCCTCTGAAGGACTTTATCTGGGGTGA
TTAGACGTCTACAAAATAGAAGACTGCCAAAAGCTAGTCTAGATA
ATGTGCTGTGGGGACTCTGAGGGAGAGTGTATCCAGTTAGGGTCA
GAGG

[0300] In some embodiments, the intronic domain that promotes trans-splicing primarily in the brain comprises or consists of sequences from the gene BSCL2. In some embodiments, the sequences from gene BSCL2 comprise or consist of:

(SEQ ID NO: 247)
GTCATACCCCAATATTTTGTTCCCCTCCTATCCTCCTCCTCCTCC
TCCAGTGGACTGTCTCATCCCTGTATTCCTCATGGAAAAAAATAG
GGTGGGATGAGGTGCTCCCCAAACTCCCTCATGGCCTGGGCCACA
GATCATTAAACCTTACACAAATGATTTAAGGCTTTTCAGCCCTTC
AAACCATGTGTGTTCCCAGCTCTGAAGACCTCAACCAACCCTGAT
GAGGAGGGCACATCACCCCTGTCTGCTCCAGTGAGCCCCAACAGG
AGAAAAACAGGCCATTACTTACCTGAAGCCACAAGCGGCAGTAGC
AGCCCTGGGTGTAGGGTCAGTGGAGGGTACCAAAACCTTCTGCCT
GAAATGGGTGCCCCACCCAGTAGGGAGTTGCAGCTGAAAGTATCT
GATGCAGAAGCAGTGACTATACGAAAGGAGGCCCCTGGGGAGGGC
CAGGCCAGAGGTCTGGTCTCAGTTTCTGCAGCTCAAGCACTGTCT
GGAT

[0301] In some embodiments, the intronic domain that promotes trans-splicing primarily in the brain comprises or consists of sequences from the gene GNG3. In some embodiments, the sequences from gene GNG3 comprise or consist of:

(SEQ ID NO: 248)
CTGCATCAGATACTTTCAGCTGCAACTCCCTACTGGGTGGGGCAC
CCATTTCAGGCAGAAGGTTTTGGTACCCTCCACTGACCCTACACC
CAGGGCTGCTACTGCCGCTTGTGGCTTCAGGTAAGTAATGGCCTG
TTTTTCTCCTGTTGGGGCTCACTGGAGCAGACAGGGGTGATGTGC
CCTCCTCATCAGGGTTGGTTGAGGTCTTCAGAGCTGGGAACACAC
ATGGTTTGAAGGGCTGAAAAGCCTTAAATCATTTGTGTAAGGTTT
AATGATCTGTGGCCCAGGCCATGAGGGAGTTTGGGGAGCACCTCA
TCCCACCCTATTTTTTTCCATGAGGAATACAGGGATGAGACAGTC
CACTGGAGGAGGAGGAGGAGGATAGGAGGGGAACAAAATATTGGG
GTATGACCACAGCCTTGTAAAGGTTGGTGTGGAGTGAGCATGGAG
GGGGGCCTCCAGCTGAGACTGTGCTCTGAGAGGTCCCTCTTTTTT
CCAG

[0302] In some embodiments, the intronic domain that promotes trans-splicing primarily in the brain comprises or consists of sequences from the gene GNG3. In some embodiments, the sequences from gene GNG3 comprise or consist of:

(SEQ ID NO: 249)
TAGGTGGGACCCTGGCTGGCTCCCATTAGTTGGCCAGGCTGTGCT
GTGCTGCAGGTTCCCAAAGCTCAAGATAAGAGATGCGTTCTTTCC
TTCACTCCCTGAGGTCAGGGGAGGAGTCTGGGGCTCTGTAGAGAG
AGCTGTCCCCAGGCCTCTGGGGGGGATGAGGGAGAAGACAAGTCG
TAAGGAGCCCTGGAGATGGCAAAAGAGAACCCATTTGGGGAGGGA
GGCTGCAGTCCCCTTCAGAGGTCCTGGCTAACAATACCCTTCCTG
GCTGTGTCCCAGGTGTCCAAGGCAGCAGCAGACCTGATGACTTAC
TGTGATGCCCACGCCTGTGAGGATCCCCTCATCACCCCTGTGCCC
ACTTCGGAGAACCCCTTCCGGGAGAAGAAGTTCTTCTGTGCTCTC
CTCTGAGCTCCCCTGTCCCTTCTCACAACTCCTCCCTTTTCCCTC
TCCTGGGCCCTTCCTTAGGTCAGTAATTGTTGTGAGCCCCTTAGG
CTCC

[0303] In some embodiments, the intronic domain that promotes trans-splicing primarily in the brain comprises or consists of sequences from the gene SLC3A2. In some embodiments, the sequences from gene SLC3A2 comprise or consist of:

(SEQ ID NO: 250)
ACTTTCTTTATATACTTGGCCCCCTGCATTTCAGGGCTCCACCGC
CATCTGTCTGTCTGAGTGTAAAGTGGACCTTATTGGCATCTGGGC
TGCCAAACTGCTTTTTTTCCTTTGCTTTGCCCAGCCTTCTCTTGA
AGGCTAAATTCTTGAAAAATTATATTCTTTGTGTTCCTATAGTAA
ATATTAAGCTTTATATCAACACATATGGCAGGATCTGAGGCTCTT
TACTCACCTCTGGTCCATTTCTCTAGTCTTTTCTCTGTAGTCTTT
TTGTTTTCCTGTCCTCCATCTCCTAATTTATTAGTTTTATTATTA
TATTTTATATTATTTTTTTGAGACAGAGTTTTGCTCTTGTTGCCC
AGGCTGGAGTGCAATGGCGCGATCTTGGCTCACTGCAATCCCTGC
CTCATGGGTTCAAGTGATTTGTCTGCCACAGCCTCCTGAGTAGCT
GAAATTACAGGCACGCACCACCATACCTGGCTAATTTTTGTATTT
TTAG

[0304] In some embodiments, the intronic domain that promotes trans-splicing primarily in the brain comprises or consists of sequences from the gene SLC3A2. In some embodiments, the sequences from gene SLC3A2 comprise or consist of:

(SEQ ID NO: 251)
TGAGCCACAGTGCCTGGCAGTTTGTTTTATTTTGGTTGAACAGTT
ACAAGTCTTGGTTTGTTTTCCTGCAGCAACAGGTTTATCTTGATA
TGATACAGCGTTATTTAAATTCCTTTTCATTTTCCTGCCTTTGTC
TTCACATGCTAGTTTTTTTCAGTTGTTTCTTTTTTCTTCTTCCTT
TTCTTTTTTTTTTTTTTTGAGAGATAGTCTTGCTGTGTTGTCCAG
GTTGCAGTACAGTGGTGCGATCTGGGCTCACTGCAACCTCTGCCT
CCTGGGTTCAAGTGATTCTCTCACCTCAGCCTCCGGAGTAGCTGG
GATTACAGGTGCCCACCACCACGCCTGGCTAATTTTTGTATTTTT
AGTAGAGACAGCGTTTCACCATGTTGGCCAGGCTGGTCTTGAACT
CCTGACCTCAATTGATCTGCCTGCCTTGGTCTCCCAAAGTGCTGA
TTACAGGTGTGATCCACCGTGCCTAGCCTGTTTAGTTGTTTCTAA
GAAG

[0305] In some embodiments, the intronic domain that promotes trans-splicing primarily in the brain comprises or consists of sequences from the gene RTN3. In some embodiments, the sequences from gene RTN3 comprise or consist of:

(SEQ ID NO: 252)
CTAGTTTTTTTCCTTTTCAGATTGTGAGACTAACAGATTTATAGA
GGCAGTCTGTGCTCTGAATTGTTCAGCTTACAGATTGAAGTCTAT
CAACCCTTTATAGTATCAGGTTATTTGTTTTGTATAAATTATTTT
GCTTTTGTTGATTAGCTCTATCAAAGAATAAAAAACCTCCCAAGA
TTTCTCAATCTTACCGCCCTTCTTTATGCTTTCTCTGTACAATGG
AAAAGTAGACCAAAAGTATTTGTCATGAAAATTTTTTATCATTTG
CAGTTTGTGGCATGATATGGCTTTTCTGTTTCACTGTTGGCAGTT
TTATGCATGTCCTGTAGGATAACTTGATCGTTTTGTTACATATTT
ATGTGTGTATATATACATCCTGTGTGTGTATATATATATTTATGT
AATTTAAAAAATAAAAAGCATGCTGCTTGGCTTGGCTAGCTAATG
TGTAATTGTACCTGGTAAACAATTTTTTTCTTTGAAATTCTGATC
ATAG

[0306] In some embodiments, the intronic domain that promotes trans-splicing primarily in the brain comprises or consists of sequences from the gene RTN3. In some embodiments, the sequences from gene RTN3 comprise or consist of:

(SEQ ID NO: 253)
CAGTTTCCCAGAGCATCCTGCTTTTCTCTCAAAGAAAATTGGTCA
AGTGGAAGAGCAAATAGATAAAGAGACCAAGAACCCAAATGGGGT
ATCAAGTAGGGAGGCTAAAACTGCATTGGATGCTGATGACAGATT
CACTTTGCTGACAGCCCAGAAACCACCTACTGAGTACTCTAAGGT
AGAAGGCATTTATACATATTCTTTGTCTCCATCCAAAGTTTCAGG
AGATGATGTTATTGAAAAGGATTCCCCTGAATCACCATTTGAAGT
AATTATTGACAAAGCAGCATTTGACAAAGAATTTAAAGACTCATA
TAAGGAGAGCACAGATGATTTTGGTAGCTGGTCTGTGCACACTGA
TAAAGAATCATCCGAAGACATTTCAGAGACTAATGACAAGCTTTT
TCCACTGAGAAATAAAGAGGCAGGACGTTACCCAATGTCTGCATT
GCTCAGTAGGCAGTTTTCACACACAAATGCAGCACTGGAAGAGGT
GTCC

[0307] In some embodiments, the intronic domain that promotes trans-splicing primarily in the brain comprises or consists of sequences from the gene NRXN2. In some embodiments, the sequences from gene NRXN2 comprise or consist of:

(SEQ ID NO: 254)
GTAGGCGGCGCGGGCCCGCGGAGGAGGCGCGGTGGCGGGGCGGGT
GGCGGCCTCTGATAGGAGTGCGGCCGCACCGGGGCGGGGCTAAGC
GGCTCTGGGGCGGGGCTAAGCGGCTCTGGGGCGGGGCTACTGGAG
AGACGAAGCTTGCGAGGCGGGACTAGGGCAGGGGCGTGGCTAGGA
AAAGTCGGGATTTGTGGCGGCGGGGCGAGACCGTGGTGGTGCGAA
TGCGCCCCCTATGGGGGAGGGTGCAGGGCTGAGCTGGGAAGGTTG
CAAGGCCAGGGTCCAGTTTGGGGGTGGGGGGAGAAGTGGAGGGAG
GGTAGAGGTGAGGAGAATCTGATGCGATTGCGGAAAGGTTGAGTT
CAGAAATGAGGGAGACAGATGCAGAAACAGGAGAGAAAATCCAGA
AGTAATATAAAACGTGTCTTGGCAAGGAGACAGGGCTGTTACCAC
GGGCAGAGCCAAGGAAAGAACCGAGGTCCTTATAAAGAGCAAGTC
AGAG

[0308] In some embodiments, the intronic domain that promotes trans-splicing primarily in the brain comprises or consists of sequences from the gene NRXN2. In some embodiments, the sequences from gene NRXN2 comprise or consist of:

(SEQ ID NO: 255)
GCCTGCTTGGTACAGAGCATACCAGGGAGGAGAGGCTGGAGACTG
GGGACTGGGGAGGGGCTGGGGGTCAGACCTTCCTCTGGCAGAGGC
CGGCTTCTGTGGACTTCTCTGCTGATCTTGCCTTAGAGAGGCCTC
TGCCCTCCATGCCCCGAGCTGGTCCCCAGCTTGGCCCGATCACCC
CTGTCTGGGCCCAGTGGCCCTTGCACAGAGTAGGTGCTCTGTGAA
TACTTGTGAATATCCAGGACAAACCAAAAGGCAAGAGACAGGTGT
GGTTAGTGGAAGGCGCTCTGGGCCCAGGCTCTGCACGCACCTCCG
GCCTCAAGTTACTCCCTTGCATGTGGGGAAGGGGAGCGAGCCTGC
CCACCTCCTCCAGCGGTTGAGACCTGGGAAAGGTGCCTTAAGTGC
TGCGGAGCTGGGCTAGTGGTGGTCACAGGAGTAGCCACTAGAAGG
GATGAATGGTTGCTCCCTCTGGTCGCTGACCTCCACCTCCATGTC
CCCA

[0309] In some embodiments, the intronic domain that promotes trans-splicing primarily in the brain comprises or consists of sequences from the gene SF1. In some embodiments, the sequences from gene SF1 comprise or consist of:

(SEQ ID NO: 256)
GTTGGCATGCTTCAGATGATGGTTGGGTCTGATCTTTCTTGGTCT
CTTTTGGGGAGAGAATTTTAGTTTGTTTTTTTTTTTAAATCTGTT
CAGTATGTTTAGATCTCAGTCTGATCGGCTGCCCTGTCGCTTTGT
TTTAAAAAGCTTTTCCCTCTGATCCTGTACCCCTTGGGAAATAGA
AGGACTCTTTTGTGGCAAATGTAGGGAGTTTCTGCCTATGTACGG
GGAAAGGAGAACTTGGCTGCTATTGTATAGGTTGTTGAATTTTTG
ATAGATCCTTTTAAGAGTTCAGACCCTCAGTGTCCAACTGGCCAG
GAAAACTGAATGCTGATCTTGGCTAAACTTATGAAGACAAAGGTG
ATCTTGTTGAAGAATTGGGCTTTTCCCACTTGGTAGGGTGTAACT
AGGTTTAGTTGTGGTCCGGCCTCTCGTACAAAAGTGACTGGTGAG
GGGAGTGGAGGTGGGTGGAGCCCCCAGTCCCATCAGGACTGCTTT
ACAA

[0310] In some embodiments, the intronic domain that promotes trans-splicing primarily in the brain comprises or consists of sequences from the gene SF1. In some embodiments, the sequences from gene SF1 comprise or consist of:

(SEQ ID NO: 257)
CCCGGGCCGCCGCCGCCCCCGCCCGTGGGCTCGATGGGGGCCCTG
ACCGCGGCCTTCCCCTTCGCGGCGCTGCCTCCGCCGCCTCCGCCG
CCGCCCCCTCCGCCTCCCCAGCAGCCGCCGCCGCCTCCACCGCCA
CCGTCCCCCGGCGCCTCGTACCCGCCGCCGCAGCCGCCCCCTCCG
CCGCCGCTCTACCAGCGCGTGTCGCCGCCGCAGCCGCCGCCACCC
CAGCCGCCGCGTAAGGACCAGCAGCCGGGCCCGGCCGGCGGCGGA
GGAGGTGAGTCGGGCCGAGAGAGCGCGAGAGGCGTCGCGCGGACG
GGCCCGGCCGCCTGAGGGGCGCGCGGCGGCGGCGACGGCGGCTGC
ACGCGGCAGGGGCGCGCGTGCGCGCACGGGGAGGCCCGGGCGGAG
GCGCCCCTGGGCGCGCGCGGCCTGGTTCTAGGGCCTCGAGTGCGC
ACGCGCGCTGTGGGGGGAGGGCTGGGCGGGCGGGAGGCGCTCTGT
GCGC

[0311] In some embodiments, the intronic domain that promotes trans-splicing primarily in the brain comprises or consists of sequences from the gene TM7SF2. In some embodiments, the sequences from gene TM7SF2 comprise or consist of:

(SEQ ID NO: 258)
TGGGGGCGGGGGACTAAGATGGACGCCTGGGAAGGGAACTGGGAG
GCAGCGGGGTGCCTGGGGGCCGAGGGCTGAGGACGGGGTGCGGAG
GCGCACTCTGGGAATGCCGAGAGGGTCCCGCAGAGACGTCAGGGC
GCCCGTGCGGGCCGGCGGGGAGCTGGGGGGCTAGGGGCGGACGCC
CGACGTGATGGCCCTTCCCGCAGGCGCCGCGGCTCTGCTACTGCT
GCTGCCCGCCACCATGTTCCACCTGCTCCTGGCGGCCCGTTCGGG
CCCCGCGCGCCTGCTGGGTCCACCCGCGTCCCTGCCGGGGCTGGA
GGTGCTGTGGAGCCCACGGGCGCTGCTGCTGTGGCTCGCCTGGCT
CGGCCTGCAGGCGGCGCTCTACCTACTGCCGGCGCGCAAGGTGCG
GGCCCCGCTCGCGGACGCTCGGGGGAGGGAAGCGAATGGGCTCGG
CGAGGGAAAGGACGCCCCGGGCCTTATCAGAGCCCCCTTGGACCC
GCAG

[0312] In some embodiments, the intronic domain that promotes trans-splicing primarily in the brain comprises or consists of sequences from the gene SPTBN2. In some embodiments, the sequences from gene SPTBN2 comprise or consist of:

(SEQ ID NO: 259)
GTGAGGGACACAGGACCCCGGATGCCCACTCCAACCTGCTCCCCT
GACCTGTGCTGGCTTCTGCTTGGAGAAGACATGTCTTCTCTCTTC
CCACTGCACCAGTGGCCCCCAGATGTGAGCTGAGAGTGCCATTGT
CACCACACCTTTAGGAGGTGTCAGTTCCCCTGGGTGATGCCGAGA
CACCTTCTCCCGCTTTGTTTCTTGTCCCCACCATCTTCTCAAATT
CTGTTCTCCTCTTATCATATTTCATCAAATTAGAGTTGAGACATT
TCAGCTCTCCCTGTTTCCCTGGCCCTCTTACACGCAACCTTCTAC
ACGCTGAATGCAGCATTTTTTGACAGCTAGAGGAGCGGGAGAAGG
AGCGAAAGAGAAAGAGGGAGGAGGAGGAGCGGCGGAAACAGCCGC
CTGCTCCCGAACCCACAGCCAGTGTGCCTCCAGGGGACCTGGTGG
GCGGCCAGACAGCTTCTGACACCACCTGGGACGGGTGAGAGCCAG
GATG

[0313] In some embodiments, the intronic domain that promotes trans-splicing primarily in the brain comprises or consists of sequences from the gene SPTBN2. In some embodiments, the sequences from gene SPTBN2 comprise or consist of:

(SEQ ID NO: 260)
TGAGCTGAGATTGCGCCACTGCATTCCAGCCTTGGTGATAAGAGC
GAAACTCCGTCTCAAAAAAAAGAAAGAAAGAAAGAAATCACCTGT
CCCCCTGGATGACTCCCCAGGGGCCGTGGAAAGATCTCACATCCT
GGTGCTAACTCATATCTCTGCCCCCCGCCCCCAGATCTCAGAGAA
GCTGTCTCAGCTGCAGGCACGGCGCCAGGAGACAGCTGAGAAGTG
GCAGGAGAAGATGGACTGGCTTCAGCTGGGTGAGCTGCCAAGGGG
GCCCCAGGCCCTGTGGGGAGTGGGGGGCATCCTGCACCCTGTGGG
TTCCAGAGTAGGTGAGACTAGGAACCCTGGGTGTGAAACTCACGA
TGCCCAATCTTCGTGCTGCCTGGCACAGCTCTGGGGCAGTGGCTT
TCTCTGTGTCCCTGTTCTTGAGGTTGCCATGGCCACTGTGCCCTG
CCAGTGGCCACTCTGACCCACCATCTTCCTGCAACCCCCGATCCT
GCCA

[0314] In some embodiments, the intronic domain that promotes trans-splicing primarily in the brain comprises or consists of sequences from the gene PC. In some embodiments, the sequences from gene PC comprise or consist of:

(SEQ ID NO: 261)
GTGAGTGTCCGCCGCGCTCCGCACGGTCCTCTTCCCGCGGCGGGT
CGGAGCGGGTGGACGTGCGCCGGCACCGCTGCGAGGGACGCTTAT
GTAAGGGTCGCGCGCGCAAAGGCGGCGCGGGCTCCGCGAGTGACG
GCTGGAGGAGACAGCGACGGGCTGTGCGCGGTGCGCGACGCGACG
CAGCGGACGGCGCCCCTCCCCCTCGCGCGGGGGCTCGGCCGGCTG
GACCCGCCCCCGGACCCGCCCCCGGCTGCAGCCCCCGAGCGCCCC
TCCGCAGCGTCCGCCTGCGGGCTGCCTCATTCTTGCTCTCGGGCC
CATTTTGCAGATGGAGAAACTGACTAAAGCGCCTCGCGCGAGGTC
CCTGAGGGTTCGAACCCAAGTCTGTCAGGATCGGGAGCCCAAGTT
GTCCCCATCGTACTGGATGTGGCTCAGCTCTGCAGGAAGCCGCGG
CGTGTAAGGCGAGGGCTTTCCTTGTTCCTTGCTCTCGCACTCCGC
CTCC

[0315] In some embodiments, the intronic domain that promotes trans-splicing primarily in the brain comprises or consists of sequences from the gene PC. In some embodiments, the sequences from gene PC comprise or consist of:

(SEQ ID NO: 262)
TCTTCTCCGCTAGCCAGCGCGTATCTGCGTCTAGCCGGGATGCCT
GAGCCCCAGTGCGAACTGTTGTGCTTGCAGCTTCGGGAGACACGT
GCTACTCGGGTGAATGAATCGAACGTCCCCACCCCCGCCGACAGC
CAATAACTGCGAGCCACAGCCCGGCCACTTCCGCCTATTGCGGGC
GTCGGCTAGGGTCCGGCGGCCCACGTGAGGCTCCGGAGACAAGGG
AGTAGGCGGTGGTGCGCCAGGGGCGGGCTCTCCCAGCCTCGCCAC
TTATCCAGGCGCTCGCCGGGGACGGGAGGGGCGGGGCTGACGTGG
GGCGCCAAGGCTTAAACGTGACGGACAGGCGGGCACAGGGAGGAG
TCCAGAGCCTAGGGGCGAGGAGTGACGGAGAACACTGCCCAATAA
CGGGAGGGGTTGGGCTGTCTGGGCCAATAGGAAGTCCGTAAGGCG
GGGCCGGGACTGCAGCAAGTTCGGTTGCACGGAGACCGCAGCTGT
TCTC

[0316] In some embodiments, the intronic domain that promotes trans-splicing primarily in the brain comprises or consists of sequences from the gene ANAPC15. In some embodiments, the sequences from gene ANAPC15 comprise or consist of:

(SEQ ID NO: 263)
GTTAGTTCATCCATTCAATCTTCCATCTACTTATTTATCCACTTA
TTCATGCCTCCTAGAATGTCTTACTGAACCCTGCTTGCATATGCT
ACAATCCCTCCACCCCGACATTTGGCTGTGATTCATGAGAGGTCG
TTAGTGTCCTAAATTTCTGACACTGGGTGGGTGTGGTATGGGCCA
TCATAAAGGGTCAAAAAGCAGGTTTTAGTGTGTGGAGGAGGTAGG
GATAGTTTCAGTAGAACCCTGCTACCTCTAATTTTGTATAATTTC
ATAATGCCAGTCTGCATTCTGGATTCCTATCCCTACACTTGACTC
CCATTCTCATCCCTCCTTGAACAGCCTGCAAACAGCTTTGTTGAT
CCATTATTTACTTAATTATCAGAATAACTTTGACAGTGGTATAAT
TGTTATTATCCCCATTTTACAGATGAAGACACTGAGGCTCAGAGA
GGTTAAGTGACTCAGCCAAGGTCAAACAGCTAGTAAGTGGTGGAG
CCAG

[0317] In some embodiments, the intronic domain that promotes trans-splicing primarily in the brain comprises or consists of sequences from the gene ANAPC15. In some embodiments, the sequences from gene ANAPC15 comprise or consist of:

(SEQ ID NO: 264)
TGGGTTCTTCCGCTCAGGCTGGGTGAAGCGCTTCCGGGTCGCCGC
CGGCAGCAGCCTCCCGGCGCGGTAAGTACAGACGCAAGGCTGCAA
CCGTCTCCTTGCCCCTTCATTCCTTTTTCCCCCAGAGAAACCCAT
TTCCTTTGACCCGACTCCCCAGGAGCTCCATATTGAGAGTCCTTA
ACCCTTAAAGAGCTCCAGCTCATTGGCCGCTTCCTCGAGACTAAG
CCCCACCCCGTCACACAAGGTCCGTCATTCATTGGTGTCACTTCC
TGTCACCCAGCATTTCTTTCAGTTAATTGGTCCTACCCAGGCCCC
GCTTTTTTCGCGTTTAGCAACCCTATAAGGCCAAATTTCTGTCTG
AGACCCGCCCTGCTTTCTTTCTGTTGGTCAACTGCATGGTCATTA
TCGTAATGAGCAAAGAAAGGGCGGTGGCTTTGCGACGGTGGGTTG
GGCTTTCGGAGCCGAGATCGCTGGTCTGTCAGTACTTCTTGGACA
TGAG

[0318] In some embodiments, the intronic domain that promotes trans-splicing primarily in the brain comprises or consists of sequences from the gene MAP6. In some embodiments, the sequences from gene MAP6 comprise or consist of:

(SEQ ID NO: 265)
GCAATGTTTCTCTCTGTCTCTGTTGGGCAGGGGTGCATACATGTG
TATAGGTGGGCCTGTCAGGCTCTGCATTCACCCGTCTGGACCAGA
GGGGTCTGAGAAGCACCAGTTCCTGTGAGTTGTCAGCATGAGATG
GGAGTGGGTAGGCGATGCTAGATGGAAACAGGACCCCATCACGGA
GGTGGGCAGGATAAGGCAAGGGTCAGATACCATGACAGCCTCACA
AGAGGTGCCAAATCCCAGCAGGCTGAGCCCTGGGTAGCTGAGTTG
AAGCCTGCAGATGAAACAGGAGCAGGGACCCACCTGGCACAGGGG
AATTCTGGATGACAGTTGTTTGCCAAGAGCTCAGCCTTAAAGCTC
ATCCAGGGGTCAAACTTCTTGAGGAAACCAGGCTCTGATCATAAG
TCTCAGGACACTGTATAACCTAACACCTGCTAATCCTCATTCAAT
ATCCATGACAGCTCAACTGAGAGCTTCTAAAGAATATACCTAGAG
CCAG

[0319] In some embodiments, the intronic domain that promotes trans-splicing primarily in the brain comprises or consists of sequences from the gene MAP6. In some embodiments, the sequences from gene MAP6 comprise or consist of:

(SEQ ID NO: 266)
CTTAACAAGGGGGTCAGGGAGTCAGGGAGGCAAAAGAACTTTGAA
GGCCCTGAGAACAAGAAAAGAGCACCCTGGCCTGTGGGGGCATCT
GGTGGGCAGCTGAGATGGGGCTCCCAGGATGGGCCCAACGATCCT
AGAAGAAAAAGTAGGGACCTGGATGGAATGTGGGGTGGACGGGCT
GCTGGGATGCCTACTGGATGACTCCGAGTCCAGCTACAGTACTGC
CATTGTCACCAGCGTGCCACCCCCTGTGCCACGTGCAGGTTATAA
TCAATTGGCAAGCACATTGAATGACTGATTCCTGAGCCTTCACCT
CACCCCCCTCCCTCACCCCCGCCCACATTCTGTACTAAGAACACA
GAAATCATATTCTCCTGGCTCTCCAGCAAGAGCTGCCCGGCCCAG
GCTCCACTAGGCCAAGACTTATTAGGCAATCTGTACTCTGCCCTG
TCCCTGCCTGAGCTCTACTCTCACAGTGATCACCTCTCTCTCCTT
TGCA

[0320] In some embodiments, the intronic domain that promotes trans-splicing primarily in the brain comprises or consists of sequences from the gene GAB2. In some embodiments, the sequences from gene GAB2 comprise or consist of:

(SEQ ID NO: 267)
GTGAGTTTTGGGAAACAAAGAGTATGGCGGGCAAGTACCTAGCAG
GTTCTGAATATTTGTTCTTTAGGAGTCACCATTTAAACAAGACCC
CAAGAGTGACATTAGGTGTAACCAAAGTGAAATTGTTGACTACTT
GATGAGATTCGTGAGGATAGGCATTAAATGATATCTTTTAAGAAA
CCATTGGCAGTCCTGGAGCTGATGACCCTAGTGCAGGATCATTAT
GGTTGCTTCTTTCATCATCTCAATTTGATGACATATTTGAATTGA
ACTTAAACTATACCTAAGCCTTAATCCCAGGGTCTACTAGTGATT
CAGCTCAGCACATCTAAAGGCAATGATTATTCAAGAGGATTACAT
TGGTATCTCCTGTCACACCAGCATTTAGTATTCTATACTTATTCC
CTAAATATATCTCGTTGTCATTCTCCGATATTTACCATTTACCAA
TATTACCAATATGCCTAGAGCATAGCAATTGCTCAATAAAAGTGT
ATTG

[0321] In some embodiments, the intronic domain that promotes trans-splicing primarily in the brain comprises or consists of sequences from the gene GAB2. In some embodiments, the sequences from gene GAB2 comprise or consist of:

(SEQ ID NO: 268)
AGGAGGGAGGGTTTATATTGTATTTTAAAGATCAAGGACAACAGC
CTAGAGGAGGTGGCATTTAAGGTAAGCCTTGAAGAAGGAGTTTAA
TTTCAACAGAGAGTAAGGCTGGGAATAATGCGATGTGAGAATGAT
CTTGAGAAGAGGCACAGAGGGTAGGTTCAGGGCAGATCCGTTGAT
AGCATTCACTAGAGTGTAAGCAAAAGGTGAGGAAAACTGAAATTG
TAGGTTGAAATTTTTGTTTCTGCGAGTATACTTATTTGCATTTGC
ACAGAAGGTGGTGATCCTTATATTTATTTCTGCTGTGCATCAATA
GGGGAGGTGGAGATAAATAATTTCATTGTTTTGGCTCTGGCCAGA
ATTCATTAGGCACAGTTTGTTGTCCATAGGGAGGGGAACACAACA
CACACTGGCCTTTGTCTCCCTTCCACACAGGCTGGTGGAGATTCT
GAGGCATTTTTAAACATTGCACTTAGCCATTCAGATGATAACTTG
GATC

[0322] In some embodiments, the intronic domain that promotes trans-splicing primarily in the brain comprises or consists of sequences from the gene BACE1. In some embodiments, the sequences from gene BACE1 comprise or consist of:

(SEQ ID NO: 269)
GTGAGTCTAGGGATGTTTTGCTGAGCAGCCTGAAAGCAGACTCTA
GGATTCCCCTGAGATGAGATAAGGTGGTGTTTGGGAGTAAGTTTA
ACTTAGATCCTTATACCAGTTGTGGTTATGCATCCACAGATCTCT
GCCTTCTTTCCACAGGTCCAGCACATACCGGGACCTCCGGAAGGG
TGTGTATGTGCCCTACACCCAGGGCAAGTGGGAAGGGGAGCTGGG
CACCGACCTGGTAAGCATCCCCCATGGCCCCAACGTCACTGTGCG
TGCCAACATTGCTGCCATCACTGAATCAGACAAGTTCTTCATCAA
CGGCTCCAACTGGGAAGGCATCCTGGGGCTGGCCTATGCTGAGAT
TGCCAGGGTGAGAGGAACAGGGCTTGGCCCTACACACTCTATGCA
CACTGCACTATACAGAGAAGGAATTAGGAGAGAGAAGGGGAATTA
GCAGAAGGAGGGCAACAATCAGTTTAAAGGATTATTTAACAGGGG
TATA

[0323] In some embodiments, the intronic domain that promotes trans-splicing primarily in the brain comprises or consists of sequences from the gene BACE1. In some embodiments, the sequences from gene BACE1 comprise or consist of:

(SEQ ID NO: 270)
AAGAAGAAGGGATGAGAGGACACCAATATCTGAGACATCAGTGTG
TGCAAACGTGAGTAGAGGCTTAAATCCTATCCTTGGACTTGTAGG
CAGCTGCAAAACGCACCTTCCCTGTTTCCTCTAATGTCCCAATCT
AAAAGAAGCAGTCAGGGAGGAGGGTGCAGGTAGGATCGATGAAAG
GGCATTCACTCCAGTTCCTCGTTCCAGTTCCATCACTGCCCCCAC
CACACACAGAAGCCCTGGTTAGTGGTGTGATTAAACACAGGTGGG
GCTGCCACATGTTGAGCACGTTTCACAGAAGTGGTGTGTAATACC
AACCTGCTTTTCTGAGATGCTTGAACAAACCCCTTCTCTAGAACT
TGCTGTAGAGGTTCCACATTCACCCTGCCTGGCACTTTCTCTACC
ACTCGGATGGTACCACTAGGTTCCAAGGCAGTAAGAGAGTCAATG
GTTCCTTTTCTCGGGGAGCTTGACGGAGCCAGAGGGCGGAAGAGA
TGCC

[0324] In some embodiments, the intronic domain that promotes trans-splicing primarily in the brain comprises or consists of sequences from the gene FXYD6. In some embodiments, the sequences from gene FXYD6 comprise or consist of:

(SEQ ID NO: 271)
GTAAGGACCATCCCCCCAGCTCCCCACCTGGCTCTAGCTGAAAAT
GACAACTACAACTGGAGCTGGCTCCTGCGCCCACGACACAGCCAT
TCATGCTTTTGGTGCACATTCCCCTTAATTACCAAGGCTCCCAAT
TAACGTGGGCTGCTGTGTCTGGTGCTGGGTTATTTTCTCCTATTT
TTCCGTTCCTCGGGGTTTACTATTGCAGAGAGACACCAGGTCTGT
CATTGTGCCTGTCTTGCTCCCTTCCCACCCTAACCAGAGGGAAAC
CGAAAAGCAACAGCTGATGGCAAATCCGCTCCGGCGCTTGCACGC
CTCCTCGGCGGCAGTCTCCTGTTGCTTCTCGGAGCTTGACTGCCC
TTTGGAAAAATCTCTCCGCCCCTCGAGAGGAGAGAGGAGCAGAGG
ACGCGCGCGAGCACAGAGCGGGAGGACGGACAGGGAGAGGAGGAG
AGGGGGTCTGCGCGCGGCCGCTACCCAGAAGCCAGCGGACGGCAG
CACG

[0325] In some embodiments, the intronic domain that promotes trans-splicing primarily in the brain comprises or consists of sequences from the gene FXYD6. In some embodiments, the sequences from gene FXYD6 comprise or consist of:

(SEQ ID NO: 272)
TATATTTCCTGCCTTGGGGTTTTGAGACCTGACCTTTTATTAAAA
TAATTAGATCATCTAGGGCAGAGCTGGAAGAGACCTCAGGATCAT
CTAGTCCATCTCCCTATTTTCCCAAATGAGAAAACAGGCCCAGAA
CTGAGGGCAGCAGAGGCAGGGCTAGGTTTCTTCCTAGCAGTACCC
ATCATCCCCGGCTTGGGGTTTGTAAGGAACTCTCCGTGGCCCTAC
CTAGGCTTGGACAATCACAGCCTTTCTCAGTAGCTCCTCCCTCCA
CCCGGCTCGGCCATACACACACCTTGACTGAGGCTGGACAGCCTC
CATCTCAGCATGGCTCCTGGCTACTGACACTTGTGCCTGGCCTCT
GCCCCTTCCTACAAGCTCTGCCCCTAATAGTAAGAGCCAATTTCT
TGAGCACTCACTATGAGCTAAGCCTCCCATGGGGTCAGTCTCTAA
TCACCATTTTCCCACGTGAGGAAATAGACTCAGGAGCTGAGTGCA
GAGA

[0326] In some embodiments, the intronic domain that promotes trans-splicing primarily in the brain comprises or consists of sequences from the gene PHLDB1. In some embodiments, the sequences from gene PHLDB1 comprise or consist of:

(SEQ ID NO: 273)
CTGGGTACCCTCAGTAGATGTTCTGGAGATGTTGAGAGCATGTTG
TAGGGGCTTCGATTTGGGAGGTTCAGTGGGAGCCCGTGGAGGTTT
CAGGCATCTAAGGCAAAAAGAAAGAGGGGAGAGTTTGGGGGAGGG
AGAACGGATTGTCAAAAACACCCTCTCAAAAGCGTGTTAAAGCCT
GGGAGTGGAGGGTGGTCTAGGAGAGTCGGGAGGGCAGGGTGGGAG
GAGAGGGGGATGTGTGGTGGTGGTGGTGGTGGTGGTGGTGGTGGT
GGTGGTGGTGGTGGTGGTGGTGGTGATGGTGGAGAGCCCAGCTGC
AAAGATGAACAAAGCGGGCGCTGTGCAGGCTGGGGGAGGTGCTGC
TGTGGGAAAGGGTGGGTGGGGGGACCTTGGGCTCCAGCCCCACAA
GGGCGTCTTCTTTGGCTGGCCAGGCGGACGGGACGGGGGACGGGG
GCGGGGACTGGCGGGAGGGGGGCGGGACAGGCTCGCTCTCCTCCT
ACTT

[0327] In some embodiments, the intronic domain that promotes trans-splicing primarily in the brain comprises or consists of sequences from the gene PHLDB1. In some embodiments, the sequences from gene PHLDB1 comprise or consist of:

(SEQ ID NO: 274)
TAAGAGCGCCCCGTCCCACTACACTTGCGGGTCCCATTCGCTGCG
GTGCTAGGACTGGATAAGGGGAAGTCCCCGGGGCCTGGCGAGAGC
CCTGAGATCAGCTCTAGGCTAGGGAGCTCGGCAGAAACCCGTGGG
GGAGAGAGGGCACCCCAGGTGAGTGCGTGGGGGCGAAAGGAGCGT
TATGGGGAGTTTTCCTGTGAGCCTCTTGCTTTTGCCTTCCTCGGC
CGCTGCCAACGCCACCGCCAGAGGGGGCCGTGACGCTCTCCCCCC
CTTGGAGAAACTCTGATCCTGGCCCTATCCAGACTCTCCCGCCGG
CACCCAGGCGGCCGGGCGGACACTCGCGGGGTATCGGGCGGCGAG
CGCGCGCGCGGGTTTTCGTCCTCCAGCGCCCCACACCTCCCCCTC
TCCGCCCACAGCAGGACCTTGGGGCGGGGGTATCTCCTGTGACGT
CTCCCCGCCTGTCCCCAGGCCGGCCGCCTTGATGGACCAGGAAGG
GATT

[0328] In some embodiments, the intronic domain that promotes trans-splicing primarily in the brain comprises or consists of sequences from the gene NRGN. In some embodiments, the sequences from gene NRGN comprise or consist of:

(SEQ ID NO: 275)
ACCCAGTGACCCCACAAGAACCCCCCTGCTTCGCCCCCAGGAGAA
CGCCTGCTCCAAGCCGGACGACGACATTCTAGACATCCCGCTGGA
CGATCCCGGCGCCAACGCGGCCGCCGCCAAAATCCAGGCGAGTTT
TCGGGGCCACATGGCGCGGAAGAAGATAAAGAGCGGAGAGCGCGG
CCGGAAGGGCCCGGGCCCTGGGGGGCCTGGCGGAGCTGGGGTGGC
CCGGGGAGGCGCGGGCGGCGGCCCCAGCGGAGACTAGGCCAGGTG
AGGCGGGCGGCGCGCGGCTGGCTGACAGCTGCCCTTCCCCAGCCC
TCCCCAGGAGCAGGGGGAGAATAAGGGCGGGTTGGAGGTGCAGGG
GGCGTGGAGGGAGCTAAGGGTTGGGGGATAGAAATCCGAGATGGG
AGGTGGGTGGGAAGAGGCTGAAGGTTGCGCGGATTCCAGGAGCTC
ACCTGTTTCTCCCTCTGCATCCTCCCTTCTGCCCCGCCCTGGACC
GAAG

[0329] In some embodiments, the intronic domain that promotes trans-splicing primarily in the brain comprises or consists of sequences from the gene NRGN. In some embodiments, the sequences from gene NRGN comprise or consist of:

(SEQ ID NO: 276)
ACTGAGCATTTTCAAAGGTAATGAACACGGCCCCTAGGCGGCGGG
GTGGGACCCGTGAGTGGGAGAAAAGGATCGAATCCCCAGCCCTTC
CCTCTGCCCACCCTCACCCCTCCCAGCCGGGGAAAATGCACCCTG
CCCCTGCGGGTTTTCTGATACATCCAGACGCCCGAGGCTGCGACG
GGGACATACCTGGACCAAGACATGCGCAGCCACCCCATTTGGCTG
CACAAGCCCGGCCAAGGGGCAGAAATACATCGCGGCGCGCACACG
TACCTGCCGCGGGGCTCATTTCAGCGCTTTGACTCGGGGTGGGGG
TTCTGGGTGACTGGGGCCCTCTGGCACTCACCGCCCAAAGAATCC
TGGTACTGAAAGGGGGAAGGGTGGGGGGAAGAGGAAGTAGCAGAA
GAGGGCAGGTTCTCAGACCTTTTCTCTCCTCAGTTCCCGAGGAGA
GATGGATGCCGCGTCCCCTTCGCAGCGACGAGACTTCCCTGCCGT
GTTT

[0330] In some embodiments, the intronic domain that promotes trans-splicing primarily in the brain comprises or consists of sequences from the gene TPI1. In some embodiments, the sequences from gene TPI1 comprise or consist of:

(SEQ ID NO: 277)
GGGACTCAGTCCCTGCAGTTCCTGCCAGGCCTTGCCAGCCGGGGC
GAGGGTTGGGATGATCCTGGCGGCCTATGCCTGTGTGGGCTGCCC
CTCCCGCTGTGAACCCTGCATTTGTCCCGCAAGTTTTCACTCAGG
TAGACTCCCTGGGTACAAGGGTGCCTGCTCAGCAGTCGGGCATGA
GCTGCTCCGATGGGCGAAGGAGGTTGTCTATCCCACAGTTGGAGA
GGGGCCCTCTCTGCCCCAGTGGGCGATCTGGGCTACGGCCAAGTT
GCCACCAGCTAGTTCCGCTTGAAAACCACTTCTGGCCCCGTGGGG
GACTCAAGTCGCCAAGCGAGGGTTCCCCTGAGCGCCGGAGCTCAC
AGGTCTCGCCTTGTCCCGAAAGCCCCGCAATCGAGGCGGAGGCGA
CCGAGCCCCCGACTCTCCTAGAACGTTGCCACAAGAAGGGGGAAC
GTCGGAACAGTGCATCATCGGGCGGCGGCCGGGGCGGCGGCAGGA
GGGC

[0331] In some embodiments, the intronic domain that promotes trans-splicing primarily in the brain comprises or consists of sequences from the gene TPI1. In some embodiments, the sequences from gene TPI1 comprise or consist of:

(SEQ ID NO: 278)
CGCAGACACTGACCTTCAGCGCCTCGGCTCCAGCGCCATGGCGCC
CTCCAGGAAGTTCTTCGTTGGGGGAAACTGGAAGATGAACGGGCG
GAAGCAGAGTCTGGGGGAGCTCATCGGCACTCTGAACGCGGCCAA
GGTGCCGGCCGACACCGGTAAGCCCTCGCCGAGGAGGGGTCTGGC
CGGGCCGGGGCCGGGGCCGGGGCAGGAGTGGCAGCGCCCTCTCCC
GAGGCCCCGAGGCCCCGAGGCCGGTATCCGCGCGGACCTGATGCA
GGGCTGTGGGACGAGGGCCGCTGGGGTCCGGGCAGGGGCCTCGCA
GCCGCAGCCCCGTCGGTGCGTCGAGGGGGCAGGGCGGAGCACATG
ATGCCCCTTGGACTATGGGGCAGGTAAGGACGTTTTGGGTCTCCT
GGAGGAAGGTGGCCCCGGGGCGCGCACTGGGGCTGTGCCCGCCAG
GCGACGGGGTTAGGAGCGGAGCCCGAGGCTCTGCGGGAGACCGGG
GGAG

[0332] In some embodiments, the intronic domain that promotes trans-splicing primarily in the brain comprises or consists of sequences from the gene ZNF385A. In some embodiments, the sequences from gene ZNF385A comprise or consist of:

(SEQ ID NO: 279)
GTATGAAAGGGGGTGGTGTCTGGAGGGAACAGGAAGGGATCCTGG
AGACCTTCTGCTCTAGTAAAGTCAAGGGAGGACGGGCCAAGCACG
CAGCCTCCTCGGTTTGCCTTTGTTCCTGGGAACCCCTGTTGCTGT
CAGGGGGTTACTGGAGCAGTGAAGGGCGGCCAGAACTCCCCAGCT
GGTGCACAGCAGGGTCGCAGAAGGGAGCTGGGCCAGTGGAAGCCC
AGAAGGGCTCTGAGGACCTTTGGGCTGCCCCTTTGGAGTCTGGTG
GAGTTCCTCCCGTGACTCTGAGAGGAGGAGGAGAAGGTTTCAGAG
AAGGGTAGTTGAATGGCTGGCCTGGACTTTCATTTCCCCTTGGGG
TCAGACCCAGGCATTCCCCGCCCATAGGCCAGGTCGAGGTTCCTC
CTGCAGAACTGGACCTGTAGCTGAGCATTCCTGGTGAGACAAAAG
GGCATGGGGGAAGACTGAGGAAGGTTGGGAGAAGGGGCTCTGAGA
ATGG

[0333] In some embodiments, the intronic domain that promotes trans-splicing primarily in the brain comprises or consists of sequences from the gene ZNF385A. In some embodiments, the sequences from gene ZNF385A comprise or consist of:

(SEQ ID NO: 280)
ACTGTCCGATTCCTCAGTCACCTATTCCTGCTGCTACCACTCTCC
CATCCTCTCACTCACTTTCATCTGTCCGTCTCTCTGTGTGTGTGT
GTGTGTGTGTGTGTGTGTGTGTGTGTCCTCTCTCCACCCCATCCC
AACCTTGAAGGTGACAGAGGAGGGAATAGACACAAAGCATACAGA
CCCCCAGCTACTTAAGGGTCAAAGCCAAGGATCTTACCCTCTCCT
TTAGCCCTGAGAATTCTGAAGCCCAAACTCCCAGTAGCCTTGACC
CCCTGCTCTGTCTCAGTCACCCTGACCACCCATCCTGGCATGGGG
TGAAAGAGACAGACCCCTCCAGACCTTTCTGGACCAGCTCCCAGC
CCCCAGCTGTGCCTGAGCCCTCCCCACCCCCTCCCTGTCGCCTCA
GATTCCCCTAATCCCTGCTCCCCTGCCCTCCCCTCTGCCCCACTT
TTCCAGGATTCTGATTGGCTGATTCTACTGACTGGGCTGAGGGGG
AGGG

[0334] In some embodiments, the intronic domain that promotes trans-splicing primarily in the brain comprises or consists of sequences from the gene DTX3. In some embodiments, the sequences from gene DTX3 comprise or consist of:

(SEQ ID NO: 281)
ATGGGCTGCTGGGTTGGGGGCCATGGGAATTGGGAGAAGGGGTTT
CTCACTTTCCTTCCATTTTTCCGCCCTACCAGGTCACACGACCTA
CAAGTAGGGAGCAGGGAAAGAAGAGTGAGCCTGCATGCCAATTCT
AAGCTCTTCAGGATCAAAGTAAGCAAAAAGGAGGGGCAAAGAGTC
TCCCTCCCCTTTAAACAGCCCATTTTTCCCCAAGAGGTGGGAGGG
GCAAGTTGTTTCTATGATCTGGGAGAAATGACAGGAGAAACAAGA
CTGATACTTGGCTTAGATGATAATATAGCTCTGGAAACTTTTTTG
CTCTTCAGTGGGTTTTGGGTTTGGAAGATAAGGGGAGACAGAATA
TGAATTTGGGTGAAGGGTTGGGGATTAGGCTTTGAGAAAACAGAG
GTAATAGAGGGTTTGGAAGGAACCTGAAGTAGGAGGCACTGATAC
TTGTCAAATGGGGACCCCCCACCCTGAGTCCCTTTCACCCTGGGG
GCAG

[0335] In some embodiments, the intronic domain that promotes trans-splicing primarily in the brain comprises or consists of sequences from the gene DTX3. In some embodiments, the sequences from gene DTX3 comprise or consist of:

(SEQ ID NO: 282)
ATGGCAGCCTGTGGAGGCACCTGCAAGAACAAAGTGACTGTGTCC
AAGCCCGTGTGGGACTTCCTGAGCAAAGAGACCCCAGCCCGGCTG
GCCCGGCTTCGGGAGGAGCACCGTGTGTCCATCCTCATAGATGGC
GAGACTTCTGACATCTATGTTCTCCAGCTTTCCCCACAGGGTCCT
CCCCCGGCCCCTCCAAATGGGCTCTACCTAGCCCGGAAGGCTCTC
AAGGGGCTGCTAAAAGAGGCAGAGAAAGAGCTGAAGAAAGCTCAG
AGGCAGGGGGAGCTGATGGGCTGCCTGGCTCTGGGGGGTGGAGGG
GAGCACCCTGAGATGCACCGCGCAGGCCCACCCCCTCTCCGAGCA
GCCCCACTTCTGCCCCCAGGAGCTCGGGGGCTCCCCCCTCCTCCT
CCCCCCCTGCCCCCACCTCTTCCTCCTCGCCTTCGGGAGGAGGCA
GAAGAGCAGGAGAGCACCTGCCCCATCTGTCTGGGGGAGATCCAG
AATG

[0336] In some embodiments, the intronic domain that promotes trans-splicing primarily in the brain comprises or consists of sequences from the gene CORO1C. In some embodiments, the sequences from gene CORO1C comprise or consist of:

(SEQ ID NO: 283)
GTGTGTTTCCCTAATAGCGGGGCAGCTGGCGAGGGACGCAGTAAA
AAGGAGCGAGGTGCAGGTGGGGCCCCGCTGCGCCGAAATGACTGA
GGATGAGGTCAGACGTGGAGGGTGGGAATGCAGAAACCGAGCTCT
CCCGCCTGTCCCCACCGGCGCACGCTCCCCAGCTCTCCGTCTCTC
AAATGATTTGAATGTGTTGGGGGAAGTGGCAGGCTGCGGTGAGAG
CTGAGAAGAAAGGGGCTTCCTCTTGGAGGGAGGCGCTGGCCCTGG
CATCCTTTTTTGGGAGTGTTCAAAGGATTTTGAACGCTGGAAAAG
GAATCGTAGGCTTTACTGCATCACGATTTAGAAACACATCCTATA
TTTGGCCGTAATGTAGGCTGCCCTTGTTTTGTGGTGTCTAAAGTG
CTTGCTCTACATGTTGCAAACGTGGGATTCAGAGTGCGAAGCAAA
TTGCAAGTTGTTCATTTCCCCCGGCATGGTAAGATACAAAGGCTT
TTCC

[0337] In some embodiments, the intronic domain that promotes trans-splicing primarily in the brain comprises or consists of sequences from the gene CORO1C. In some embodiments, the sequences from gene CORO1C comprise or consist of:

(SEQ ID NO: 284)
ACAGGAGCCGGCGGGGCGAGGGGCAGGGCTAGGTGGAGGGGACAG
TGCTGGGTGGGCGCGCGGGGCGCGGGTTCACGGGCTGGGTTGCAA
GGGGTTAGGGCCGGGGGCTGCTGTCGGGGGCTCGGGGAAAGGGAG
TTGGGGACCGAACCAGGTGGCGTGGGGAGCGTGAAGCAGGGTCCC
TGTGGGGAGGAGGCTTTCGAGGTCCGGAACGCTCCTGGCCGGGTG
CGGAGCCGCGGGCCGAGGTGGGACGAGGCTGCCCAGGGAAGGCTT
TTAGGGGTCAGGGATCGCCTGCTTGGGCGAGGTGCTGGGAGGGAA
GGGCTGCTTCGGGCGAGGCGTAGAGCCCGGGGGCTCCAGGCCTGG
GGACTGGGTTTGGGCCGCCCCAGGGAACGAGTGGGTGGGGGCGGG
TAGGGGCCGGGCTCACGTGGGGCCGGGGCGAGCTGGGCCCTGCGT
CGGGAGGGGCGAGGGCGGCCGCCTGGCCTGCGGGTTTCCTGGCTT
TGGG

[0338] In some embodiments, the intronic domain that promotes trans-splicing primarily in the brain comprises or consists of sequences from the gene VPS29. In some embodiments, the sequences from gene VPS29 comprise or consist of:

(SEQ ID NO: 285)
GTACTTTTATGTTGATTACCAGTGAGGGTGGAAACTTCATAGTGG
TTTTTAGTTTTACAGATGTTTTGTCCACTGAGATCTGCATTGAAA
CAATTAATATAGGTCATACAACAAATACCTGCTGAAACTAGTCTT
TATAAAGAAGAATCTTACTTAACAATTTTAAAGTGTGCTAATTTC
ATAACCTTGTGTTACTTTGAGATTACAAACTATGTCCCGATAACT
CTGTGTCCTGGTAACGGTTCCTTTTCTTTGCAATAATTTTAATTT
TTGTTGCAAGATAAATCAAGCTTCTTTTGGTAATCATTTTAATTT
CATACATTTTGTTTGTTTGATTAATTTTCATTTACAAAGTCTGCA
GTGGCAAAACTATTTTGTTTTATCCTATTAGCTATTTAATGGTTT
CTTTGATAATATTAAAGAATAGTCATGCCTTTAAAAGCAGTTAAA
GGGCATGTACATTTATGCATGCAATATCTGTAAAGGAAAACATTT
TGTA

[0339] In some embodiments, the intronic domain that promotes trans-splicing primarily in the brain comprises or consists of sequences from the gene VPS29. In some embodiments, the sequences from gene VPS29 comprise or consist of:

(SEQ ID NO: 286)
TTAAAGGACTCTATCATCTATGTCTATCCCGATTTGTCAAAGTGT
GGAATTTGGGCGGGAACATGTTTCAAAGTATGACACGTGTTATGT
AACACTATTTCCCCATAACTTTGTCATCAGCAGGAAACCAGAGGA
TTCTGTCCTAGTAAGGATCCCTACTAATTTGAAATGATTGTGTGG
TCATTCATACAGTTATATCTTTAGACTGCTAATAGTCTTGAGTCT
TGGAGATAATCCACAGTACTTTATAGAATTAGGTCATCAATCATT
ATAAAGTACCATGTCTTACTAATGTTCTTTCTGGTACATTCAGAT
TGAACAGCTCATTCATTATTAGTACCAAACATTTCAACCTGTTGT
AGACATATACCCTTTTATGAGTTTGGGGTGGTGGTTGTTGTTGTT
GTTCTTCTTCTTCTTTTAAATATAGAAATCTATTATTTTTACCTT
TTTCTCAAAGCAAGATTCCCATACTAACTATGTACTTCAATCCAT
ATCA

[0340] In some embodiments, the intronic domain that promotes trans-splicing primarily in the brain comprises or consists of sequences from the gene CABP1. In some embodiments, the sequences from gene CABP1 comprise or consist of:

(SEQ ID NO: 287)
GGGTCGTCCTAGTCCCCCCGCACGGTATTGGGAGTGGAGGCAGCC
CCACACGGAGGCGCTGGGAGACTTTCCTCCCAGCAGTGTCCTGTC
ACTGCATTCCGGCCCCTGCGTTTGTAGGCAGTGATGTCACAGAGT
GCCTTCATGCTCCTCGGGTCTCCGGTTCTCCCCGGACCTCTGTAG
TCCTCATTGCCAAAGTTGTACCCCCTGGGGAGTGCACCCTGCCTG
CATTTCTGGAGGTTCGGGCGGTTCCGGGGCTCTGCAGGAGCCTCC
AGGCGTGATAAAGAGCGCTGCCGGCACTCCCGGGGTCTCGGCCTC
TTTGGGGCCCATTGCCAAGCCCCTTCCCTCCTCGTGCTCCCGCTC
CGCGTTGCAGCGTCCCCTTCGCCGCCAGGGGCCGCCCGGAAGCGG
GGCTCCCCCAGGGCGGGGCGGGGCAAGGGGCGGGGCGCGGCGGTA
CCTGGGCCGCCAGGGAGCCGGGGGTGGGCTCTCCGGGGACAGCCG
GCAG

[0341] In some embodiments, the intronic domain that promotes trans-splicing primarily in the brain comprises or consists of sequences from the gene CABP1. In some embodiments, the sequences from gene CABP1 comprise or consist of:

(SEQ ID NO: 288)
TAAGGGCCGCGCCTCCCGTCAGCGCTCCCGGGAAAGGCGCTCGGG
ACCCTGCCGGCCGCGGTTGCGCGTCCACAGCCTCCTCCCGCGGCC
CGTGGTCCCCCACGGATCACGCCTCGGCTCACCTCGTCCTCCCCG
GGCCGGCGCCCTTGCCGGCACTCCTCCTCCCCGTGCCTGATTCAG
CACCCCGTGCGCTGTCCACGCTCCGGGCCTCTTGGGGCAAGGCCC
TCCCCGCTAGCCTCCCTCATACCCGCCAGAACCCGCCAGTCCTGG
AAGAGAGCGACCTCTACGACCGTCCTGGAGATTTGCGGGGGTCAA
GGAGGGGCGCTCCGAGCAGGTGGCGCCAAACCCACTCCTCTGGCC
TCTGGCCAGTACCGCCAGGGAGGGACTCAGGAGAGCAAGCGGTTT
GGAGTCTGGGGGTCAAGAGAGGGGACCTCAGAGAACACAGAATTA
CTTGAGGGCGAGGGACACTGGCCACTGCCTATCATGTCCCTGAAG
GCCT

[0342] In some embodiments, the intronic domain that promotes trans-splicing primarily in the brain comprises or consists of sequences from the gene CDK2AP1. In some embodiments, the sequences from gene CDK2AP1 comprise or consist of:

(SEQ ID NO: 289)
GTGAGCGCGGAGTGAACGAAGTTGGCGCAGCTCTGGGGCTGCTGG
GGCCCGCGCGCGGGCGTGGGGGCAGTGGGTCACGTGGACGCCCCA
TCTGGGAGCCCCCAAGGGCTGGCCCTGGAAGGCCCTCGATGCAGA
AGCCGGGAGGGGCTCCCCTCAAGCTTCCTGGGGCTGCGGCCGCAG
CCGGGCGCTCCCAGGAAACTCCTCCAGAAGTTGTCAGGCAGCTTC
GGGCTGAGCCCAGGGGACCGAGGGAGCCATGGGGAGTGGGCACAA
CATTGAGGGATTCGTAGGTGCCGGGCTTTGTGACCTCACTGGGGC
CCTTCTTCTCTGACACTTGGTCGGAAACAGACTTCCCAAAAGGCG
GTTGTGTTGCGGGGCGGGATGGGGGGAAGGACTCGACGGGGAGAG
GAGTGGCCCCGTTGGTCACCGGTGCCACGCTGGCTCTCCTGCTCG
AGTTTTGGGCCTTGTTTGCAAACGTTGACCTCGTAACCCCCCAAA
TCGG

[0343] In some embodiments, the intronic domain that promotes trans-splicing primarily in the brain comprises or consists of sequences from the gene CDK2AP1. In some embodiments, the sequences from gene CDK2AP1 comprise or consist of:

(SEQ ID NO: 290)
ACTTGGCCGCGCACATGCCCGCCGCCGCCCTCAACGCCGGTGAGT
GAGCCGCGTGCGACGCGCCCCAAGCGCCGCCAAGTTGGGGGTCCG
CGCGCCCGGCCCCGGCCCGGGGATGCCCGGGGCGCCCGCGGAGGC
CGGGGGCGGGGGGCTCAGGGTCCCGGCCCGGGGCAGCGCTGCCGC
CGCCATGATTCCCGAGCCCGCGCCGCGAAAGTTCTCTGGTGCGCC
CCGCACGCCGAGGGCCTCGGCTGGGGGTGCGGGGCGGGCGGCCCG
GGGTGACCCCCGCGCCGGCGGCTGCGGATCGCAGGGAGCGCGGCG
GGCGAGGGCGAGGGCGGGGGAGGCTTGTTCTCGGCTCCTTTTTCC
TCCGGCTTCTGGGCGGCTCGGCGAGGGCCCCTGCCGGCGGGAGTC
GGGAGCGGCCCGGGCCGCGCCGGGAGCGGGGCGCGGGGCCCCGCC
GCCCTGGGGAGCGGGGTCGTGAAGCAGCCCGGGCGGGGGGCGCTG
CGGG

[0344] In some embodiments, the intronic domain that promotes trans-splicing primarily in the brain comprises or consists of sequences from the gene COMMD6. In some embodiments, the sequences from gene COMMD6 comprise or consist of:

(SEQ ID NO: 291)
GTGAGTTTGACTTTTTTAGATTCCACATATAAGTGAGATCACGCA
GTATTAGCCTTTCTGTGTCTGGCTTATTTCACTTTGCACAATGTC
CTCCAGGTTCATCCATGTTGTTGCAAATGGCAGGATTTCCTTCTT
TTTTATGGCTGTGTGATATTCCATTGTGTGTGTATGTATACACAT
ACATAGTATATACATATAGACATACATTATAATCATATTAAATAT
AAATATACACAAAAACATTTTCATTAGAGGCAACTCTTTTAAAGA
GAGTTTTTACATGGCTTAAAACTAACCACGAGATAGCCTGTTAAT
CACATTACATGACTGAGAGCTAAGGAACATTCTTTGAGCTTTTAA
TTTATATCTTTTTGATAACTAAAATTTTGAACATCAGTACATATT
TTTAAAGAAATAGTTACACTTTGCTTCATTCTGTGACAAATTTGC
ATATAAATTAAAACAATACAAATCCTCTTAAGTAGCAAAATAGAA
AATT

[0345] In some embodiments, the intronic domain that promotes trans-splicing primarily in the brain comprises or consists of sequences from the gene COMMD6. In some embodiments, the sequences from gene COMMD6 comprise or consist of:

(SEQ ID NO: 292)
AAAGAGAATACACGTTTTGGTCTTTTTTGTAATTCACAGTGCTGG
CCTAATTGTTATTATTCTGTGCAGCATTTGTGCTGTCCTGATTCC
ACCTCTAGAAATTTTTTCCTATAGGAAAAAAAAAATCACAATTGG
ATTAACTTTTTTTCCCCAGCTTTATTGAGGTACAGTTGACAAAAT
TGTGTATTTTGAAGGTTTCACAATGTGATGATATGATAAAAGATA
TACATTGTGTAAAGATTACCACAGTCACTCTAATTAACACATCCA
CCCCCACACAGTTACCTTTTTTTTTTTTGGAGAGAGTGTGTGCAT
GTATGTGTGTGTGTGTGTGTGTGTGTGTGTGTGTGCTGAGGGCAT
GTAAAATGTTTTTTAGCAAATTTCAAGTAAACAATAACAATATTA
CTGTAGTCACCATATTGTACATTAGATCTCAGACTTACTCATTTT
GTAACCAAAAGTTTGTACCTTTTTACTAACATTTCCCCATTGACC
CCCA

[0346] In some embodiments, the intronic domain that promotes trans-splicing primarily in the brain comprises or consists of sequences from the gene SLAIN1. In some embodiments, the sequences from gene SLAIN1 comprise or consist of:

(SEQ ID NO: 293)
GGTCATCACTGAGCCTCTTGAATCATTTCACATCATTTTATATAC
CAAAAATCCACTGAGATAATTGGTTGAAAAAGATAAAATTGCTCT
TTTTTACAAGTTCTTTTTGTTTGTTTTATTCTTTATAAAAGTGCT
TCCTGTTACAATTCTTTAGCTATGTACTGAAGAACAACTAGGATG
TGATAGCTTCCACTCCTGTCCTCCTCCTCCTCCACTGTAACCTTG
GGCACTAGTGGAGCATTATTGTTTTGTTAGCCTGCCTTTACAATA
ATTTTCCTCCCCTTTCTGAAAAGCTTCAATGCTAAACAACAATGT
AGAGCATTCTTTCTTGCAATAGACGCTAATTGTGTTCCTAGTTGG
GATCTTGCTGTCATAGCCACAATAACTGTGTCAATTGTGCAGGGA
GGCTGGGTCACAGTGGTTATTGTGCAGAGTGATGAATGCTGCTTA
CTTGTGATGTGCTGCCGCCCGCATCTGTGGGTGAGAACACGCAGT
TACT

[0347] In some embodiments, the intronic domain that promotes trans-splicing primarily in the brain comprises or consists of sequences from the gene SLAIN1. In some embodiments, the sequences from gene SLAIN1 comprise or consist of:

(SEQ ID NO: 294)
TAAGTTACGGGTTGGATAAGTGACATATACGACTGGTGTCAATTG
GCAACCAGGCTTCACAGTTTCATGAAATGTGTGGATTCTGAAAGT
GTTGTCATTGCGAATGTGGTTTCCTTGCCTAGTTCTTCCACATAC
TTAAGGAAAAGATATTTTTAATGTAATTGTTAGAATGTGTTGGTA
CGTAATGATTCTGAAGTAAAAGGAATTTTTTTTTTTTTTTTTTTA
AGTAAACTTGGTGTTTTGCAAGGATCTGAAGAATCCCAGTTTGGA
GCTGATTATTTTCTTGACTGTCCACATCCCACAGTTTTTTTTTTT
TCTCTCCATCCCACTGCCCATTTTAAAGCACTTTTCAGCTGTCTG
ATTGCTCATTAGCATTGCTCATTAAAAGTGGTCTGGGGGCATGCA
TTTCAAAGCAGTCCTTTTAATACTTGGTTTTTCAAGTTTTGTCAA
ATTCCCAGTGAATACAAACCAAGTTATTTCTTGAAGTTTAGCCTT
GTTT

[0348] In some embodiments, the intronic domain that promotes trans-splicing primarily in the brain comprises or consists of sequences from the gene FARP1. In some embodiments, the sequences from gene FARP1 comprise or consist of:

(SEQ ID NO: 295)
ATCTTATTTCTAGATTTTTTTTTTTCCTAAGCAATCTCTTGAAAA
GGAATATCAGTGAGCAGATTTCTCTGGGGCCATTTGAACTTCATT
AAAATTTCAGAGAGGGCTTTTCAATGAGAATATATTCATGTAAGC
ACTGGAGAGTTTTGCATAATTTTAAAGTTGAACAGAATTGGGTAC
AATTAGTGATGAAAATACAGTCCATCCCAGATTCCTAGCTGATTG
CCATTTTGGTTTTCCCAGCAAACACCCTTTCTACCCCACTTCCTA
GCTTTATTGAGATATATCTGGTATATAAAAAATTGTACATAACTA
ATGTATACAATTTGGTGAGTTTGGATATAAGTATAGGCTGGTGTT
ACCATCACCCAGTCAAGGTAATAAACATATCCATCACTTCCAAAA
CTTTGCTGTGTCTCTTTATTGTTACTGTTTTTTAAAAAACAACAA
CAAAAAGCGCCTTTTCAAGGGAGTAGCATTTGCTCTCCTCTCTTC
CCAG

[0349] In some embodiments, the intronic domain that promotes trans-splicing primarily in the brain comprises or consists of sequences from the gene FARP1. In some embodiments, the sequences from gene FARP1 comprise or consist of:

(SEQ ID NO: 296)
ACATGTTTGTCTTACCAGCTTATTGATAAGCACTTTGTGGGATGT
TTATGTGAGAACAGTTGATTTTAATGAGAAAACAGATTTTCAGCT
CCCATGTTCAGTGTTTTATGTGACAAAATCATACACTGCAGCAAC
TAAGTAATACGAAGTGAGTACTTTAATTGAAACAATTAGAGTGAC
ACAGGAGGCATTTTCTACTTGTGTAAACGCAAAGCTTAATTTTTA
AAAAGCCTCCCCCAGTTTTCCTTCCTAAAGGAAGTGGATGATCAA
GCCTGAGCTAGATAGAATAGCAGATGTGTATTTCATTATTAATAC
AAGAGGAATCTTTTTGGGTTAATAGAACTATTCTTTAGAAGAAGA
ACTTGTTTTGTGTTACAAAGGTGTTACATGGTTACTTACAGTAAC
AATTTCGAGCAGCACAGAAAATGCAGAAATGTATCCCATTCTTAG
GATTTTTGAGATAAATTCTTTTTTTTATTTGGAGAGGGAGTCTCA
CTCT

[0350] In some embodiments, the intronic domain that promotes trans-splicing primarily in the brain comprises or consists of sequences from the gene STK24. In some embodiments, the sequences from gene STK24 comprise or consist of:

(SEQ ID NO: 297)
GTAAGGGAGAGGGCATGAAAGCAGCGAGGATAGTAGCTGCTGAAA
ACGGGGTATGTTTCATTATAGCTAAAAAAGGATGCGCTGCTTCCC
CCGCATCCCCGAAAGCTGCTCATCCTAGCAGCTTGTGTTAGAGGA
GGTGGAGGTGCAGGTTCAAGGCCGCGTGTAGGGGGAGTCAGGTGG
GAGGTACCCACCCGGGCATTCTGTGGCATTCCCAAAAGTGACTGG
TGATACTCAGCCTGGGGTATTGATAAGCTTGAAAATAGGAAGAGG
AGGATGTTGTAGGGCTGCTCACGAGCTCCAAAAACAGTCTTCACT
TGAAAAAATTATCCTGGGCTTTGATTGTGGGTCATTGACTATCTT
GGTAAACCCAGGAGTCTTGGACTGTGTTTTTTAAAACCTGTAAAC
ACACAGCCAGGCTTCCTCCTAAGTATGACCGTCATAAGACATTTG
AAATGTAGTGCCGTGACTGAAAACAATTGAGCAATTGTTCAGGAA
AAAA

[0351] In some embodiments, the intronic domain that promotes trans-splicing primarily in the brain comprises or consists of sequences from the gene STK24. In some embodiments, the sequences from gene STK24 comprise or consist of:

(SEQ ID NO: 298)
TTCCGTGCACACATGTTGAGCTAGAGATGTCTGGGTAGAAAGAGA
GAATGCTTGGGAAGCAGCTGGTCTGGGGGGTTCCTGTTCAGAAGG
AAGGCCTGAGCTAGCGCTTTGAAAGCTGTCATGTACGTGAGTCTT
TAACACAGCCTTTCCTTCAAGGTGGCAATTGATCAGAATCCATTG
GGGTGTTTTAAAAACATGGATTATTCACCTCCTCTTCTGAACTCC
CATATATTTCTGCAAGAATGTCAGATGTCCTAGGTGGTTCTGTTC
GGGCAGGTTTGGGAAACAAGGGCCCCAGACCCTGAAACTACCGGG
CACCCCTGGGGAGAAGGAGTAGAGGCCCAGGCTGGGACCTAGAGT
AAGGGCCAGCCAAGGTGGAGTCTGCGTGAAGATCCTTCTGGAACT
AGAGGGACTGGAAGAAGCCAGCGGGAGTGGGGCTGTGGATGCTAA
AGGACTGGAAAGTTACCCAGAGGAGGGGGAGGGCGTGGTTGACAA
GGCT

[0352] In some embodiments, the intronic domain that promotes trans-splicing primarily in the brain comprises or consists of sequences from the gene RNASE1. In some embodiments, the sequences from gene RNASE1 comprise or consist of:

(SEQ ID NO: 299)
GTCACTTTGTAGGTCACCACCTAGAGGGGAGGAAGACCTCGCTTT
GGAGAGTGGGAATAAAACGCTCGTGGAAAAGGGTACACGTGAGTG
TCTCATTACACGAAAAACCTCAGGAAGTAGGATGGACGTCTTTCT
GGCTGACCTGAAACAGAAAGTGTAAACCAGGCAAGCCATAGGTGG
GAGCTGGAGTTCTTTTTCTAAGAGGGCTCTTTTCCTTCTCTCTCC
TTTTCTCAATTAGGCTTTTCTGGGAAAGTGAGGCCACCATGGCTC
TGGAGAAGTCTCTTGTCCGGCTCCTTCTGCTTGTCCTGATACTGC
TGGTGCTGGGCTGGGTCCAGCCTTCCCTGGGCAAGGAATCCCGGG
CCAAGAAATTCCAGCGGCAGCATATGGACTCAGACAGTTCCCCCA
GCAGCAGCTCCACCTACTGTAACCAAATGATGAGGCGCCGGAATA
TGACACAGGGGCGGTGCAAACCAGTGAACACCTTTGTGCACGAGC
CCCT

[0353] In some embodiments, the intronic domain that promotes trans-splicing primarily in the brain comprises or consists of sequences from the gene RNASE1. In some embodiments, the sequences from gene RNASE1 comprise or consist of:

(SEQ ID NO: 300)
AAGCCAAACCCCTTTGTAATCTGTATAAGGTCCACACCCCGGGAG
CTGAGTGATTGCAGAAACTGGCCTTCCATCTCTCTCAGACACCAA
GCTGCAGATCCAGGTAAGCAGCCCAAGAGGTGTTCTCAGGTGCCG
CTTCTGCTTCAGGGTTGCAGAAGAGGGAGCTAGGGCCAGTCCACA
GCACTGAGAAAGATTGGGTGATGCTAGCGCTGAAAAAATGTGGCC
CAGGCAAACATCAGCTGGGGGCAGAGGGGTCAGGGTGGAACGTGC
AGGCTGCAGAGCATCCATGGGACTGGAGAAGAAGGAGCCTCCAAA
TTGGGGGAGGCCAGCGTTTCTCTCTGGAATACAATGGAATCTTTT
ATGATGCCAGTGTCAGGCACTGGCCTGAGTTCCCTTATGCTCCAA
GACAACAAGGCTCTGTCACCCATGGCCCTGGATGTCGGGGATACA
ATTTGGTTCATGATTTATTCAAACTGATGTTTCGATGAGCCATTT
GAGC

[0354] In some embodiments, the intronic domain that promotes trans-splicing primarily in the brain comprises or consists of sequences from the gene NDRG2. In some embodiments, the sequences from gene NDRG2 comprise or consist of:

(SEQ ID NO: 301)
GTCGTGGATGGGGCGGTGCTGAGGGCAGCCGAGGGATCCCTCTCA
GGGCTGAGGGATCCCCGCACTCCCCACACCGCCCCAATGCGGGGA
GGGGGTGGTGGAATGTTTTGGTGAGCCGAGCAGAGCCTGGAAGCG
TCCAGCCGCCCGCCCCTCGCCCCCCGGCCCCAGCACAACCCTTTC
CTGAGCGGCAGTCTGGGCGGGGTGAAAGGGGGGGCGTGTTTACTG
GGGGTCTGGGGCGGGTCTGCGGGGAGCCTAGCGCCCGTGGGCGGG
CTGGGGCGGGCCGGGGGCGGGTCTGCGGGAAGCCCGAGCCGGGGC
GGGCCCGAGTCAAAGGCAAGTGAAGGTGGAAGCGGCCGCGGCGGC
AGCAGGTAGGGGGAGGGGCAGGCGAGGGGCCGTAGGGCCTGGAAG
GCGCCAGCCGGGCCGGCGGGCGGTGTGATTGATCCGCGTCCCCTG
GAGCTGGAGGCTCGGGGGAAAGGGCCAGCACGGAGCGGGCGCTCG
GTTG

[0355] In some embodiments, the intronic domain that promotes trans-splicing primarily in the brain comprises or consists of sequences from the gene NDRG2. In some embodiments, the sequences from gene NDRG2 comprise or consist of:

(SEQ ID NO: 302)
GTGTGTGTGTAAAGTCTACAGTGGCAAACCCACTCGGGCACCGAG
AGGGACGCGGCAGACCCTGAGACCATCCCCCGGGCATTGCGATTC
AGCGGGCCTGAGCTGGTCTCCTATTCTGGGCCGGACTGGGAGGGG
TTAGCGGCGAAGCCACAGGGTCTCTTGGGTCCCAGCCCAGGACAC
TGCGTCCTCCCCAAGCCCCTACTCCACCCCCGCAGGGTTAACTCC
GCCCCTGCGCCTGTTTACCCAGGAGTCAGAGCCTCTGGGGGTCCC
CGGCCCCTCCCCCGCGCCCCTTGAGGCATTGACCCCAGAGTCCCT
GTTGGCCATCCTCTCCCCACCCCCCGCCTGCCCGCGATCGCCCTC
TATTTATAGCGGCCCCCCGCATTCCCCGCCCCCACCTCCCCGCCT
TGTTGTCCAACTTCTCCCGGAGCAGCCGGAGAGCAGGCGTCGGGA
CGCAGCAAAGAGAGGAGAGGTACCAGGACTCTGGGCACGAGGGAG
TCGG

[0356] In some embodiments, the intronic domain that promotes trans-splicing primarily in the brain comprises or consists of sequences from the gene PSME1. In some embodiments, the sequences from gene PSME1 comprise or consist of:

(SEQ ID NO: 303)
CAGATACCTCGGATTGAGGATGGTAACAATTTTGGAGTGGCTGTC
CAGGTGAGAGCGCTGCCCCACTTCCCTGCTCTTTTCTAGTCCATG
CTTCCTTCCACTTTCCCCCTTGCTTTTTTTCCCTAGGAGAAGGTG
TTTGAGCTGATGACCAGCCTCCACACCAAGCTAGAAGGCTTCCAC
ACTCAAATCTCTAAGTGAGTGACCACCCATGTGCACACTGTTTTT
GTTTTGGGAGACCTCCTTCTTCTACTCCATACACACTTCTCCTTC
CACAGGTATTTCTCTGAGCGTGGTGATGCAGTGACTAAAGCAGCC
AAGCAGCCCCATGTGGTAGGTGAGGCCCAGGTCAGGGTGCATGGG
GGAAGGACACATGTAAGGTCAGGCCTGACCCGAGCTTCCCACAGG
GTGATTATCGGCAGCTGGTGCACGAGCTGGATGAGGCAGAGTACC
GGGACATCCGGCTGATGGTCATGGAGATCCGCAATGCTTATGTGA
GGAG

[0357] In some embodiments, the intronic domain that promotes trans-splicing primarily in the brain comprises or consists of sequences from the gene PSME1. In some embodiments, the sequences from gene PSME1 comprise or consist of:

(SEQ ID NO: 304)
CTGTGTTATATGACATCATCCTGAAGAACTTCGAGAAGCTCAAGA
AGCCCAGGGGAGAAACAAAGGGAATGATCTATTGAGAGCCCTCTC
TCCCATTCTGTGATGAGTACAGCAGAGACCTTCCTGCTTTTTACT
GGGGACTCCAGATTTTCCCCAAACTTGCTTCTGTTGAGATTTTTC
CCTCACCTTGCCTCTCAGGCACAATAAATATAGTTATACCACTGC
CCATCAGCCCAAGTCTCTTTATTGGAACCGGGCCCCGCTGGCCCT
GGCTCAGGCATTTCCATTTCCATTAGTGGGACCAACCCACTGGGT
GATTTGAGTGTTGAGCCGCTGGTTGGTCCAGTCCTGCCGGATGTC
ATCAAGGTGGCAGTCAAAGTCCACAAGGTGCTGGTGGGCCCGATC
TTCCAGTAGAGCTCCCACCATCTGCCGTGACTCTTCCCAGTCCCT
CCACATCACTCTGAAATAGTAACCCCCATGGAGGTCAAACAGCAA
GTAG

[0358] In some embodiments, the intronic domain that promotes trans-splicing primarily in the brain comprises or consists of sequences from the gene REC8. In some embodiments, the sequences from gene REC8 comprise or consist of:

(SEQ ID NO: 305)
CCAGAGTCCTGCCTTTTCTGTCTCCATTTCCCTATTCTCTGTCCC
TGGCACTTGAGCACCCAGTGGCTTCCTTGAACCTGGCCCTGTGGC
ATGCCTCTGGGATCCACTCTCCTGGATCCACTTGCCTTTTTCAGA
AATATTATTGAATCCCCTCCCCTTGCTCTTCCTCTCTGGACAGGG
TGAACGGGAGCTCCCAGAGGTCAGCCGCCGAGAACTGGACCTGCT
GATCGCAGAGGAAGAAGCTATCTTGTTAGAAAGTAGGTGTCTCCG
GCAGCGTAGGGCCCGCCTGGAGCTGGATAGTCAGACCCCTGGCGT
GGGCATTCTGGGACTGGGCAATGCTCCCATTTCTCTTTTTCTGTC
CTCTGAACTCTGATTCTCTCTCCACAGTCCCGCGGCTCCCACCTC
CAGCTCCTGCAGAGTAAGGGCAAGAACTCCTAGACCAGGTAGGGT
GTCAGTGCTGGGAAGGGTCTCCTCATTTCTCTTGCCCATTTCCCC
TCAG

[0359] In some embodiments, the intronic domain that promotes trans-splicing primarily in the brain comprises or consists of sequences from the gene REC8. In some embodiments, the sequences from gene REC8 comprise or consist of:

(SEQ ID NO: 306)
TGAGTGCCCACCATGCCCCAGGGGCTTTTCTGGGAGTACCTGGAT
ACTGCTGCAGACAAGGGCTTTATATCCCAACTTGCTAAAGGGAGG
ACCCTGCAGTTTCTTGCCCTGGCATCTGCAAGGGGTAAGGGGCTT
ATGGGACAGAGCCCCTTGGGTGTTGTTGCAGAGGTGACCCCCCCG
GAGGAGCTGCGTCTGCCAGCCCCACCCAGCCCAGAGGTGAGTAGC
CTCCCTTCTAATCCTCCTCCTCCTCCTCTTTGCCCTCCCCCACAA
GGACTGCCTCCCCAAGCCCAGGGCCACTGCTAGCTTACAGGGGTC
CTTAATGCAGATGATAAAAGATGCCCCTTTCTACGCCCCATCGTA
TCTGGCCTACGCTTCCCAGATGGGTACCCTTATGCAAGGTATGAG
CTGCTCAAGTGCATGGAGACCCCGCACAAGCCCTCTCCAGGTTCC
TCTAGGGGCGGGTGTGGGGTCCTGTTAGCAGTCCACCAGAATGAC
AGGA

[0360] In some embodiments, the intronic domain that promotes trans-splicing primarily in the brain comprises or consists of sequences from the gene SDR39U1. In some embodiments, the sequences from gene SDR39U1 comprise or consist of:

(SEQ ID NO: 307)
GTGGCGGGACAGGCTTCATTGGGACAGCCCTAACCCAGCTGCTGA
ATGCCAGAGGCCACGAAGTGACGTTGGTCTCCCGAAAGCCCGGGC
CCGGCCGGATCACGTGGGTAAGTCCATCCTCTGGAAGCGGGTGGG
AGGGCAGAGTTGGGCGGCGCAGGGCGGGGCAGGGGCACTGTGTGC
TTTCTCCGACAGGATGAGCTCGCTGCATCGGGGCTGCCGAGCTGC
GATGCCGCCGTCAACCTGGCCGGAGAGAACATCCTCAACCCTCTC
CGAAGGTCAGCCCGGGCCCTAAAGCTGATACCCACTAGAGCACAG
GGAGGACAGTGCCCCACTGATGAGAACCTGTGAGCTATGGGTAAT
GGAGCTCCCAGATTCCGAACTAAACCGATATCCCAGACTACTCAT
TCTGCTCCACTCCTCCACCCCCACCTGCTCCTCCACCCAGTCAGC
CAATTGGCTTAAGTCCTCACGTATAACTCAGGATGCCCAGGAAAT
GAAT

[0361] In some embodiments, the intronic domain that promotes trans-splicing primarily in the brain comprises or consists of sequences from the gene SDR39U1. In some embodiments, the sequences from gene SDR39U1 comprise or consist of:

(SEQ ID NO: 308)
CTTGCTATTGAAACACCCAGCCTATATTTACAAGTTTTTCCGGGT
CGCCGAGAAGGGTCACGCACAGGATTGCGACCTCGATTGGAACGC
GCTTCCCGAAAGGGGCATGCGCAGAGAGGTCGTAGTCGCGTCTGA
GGTGAGGTAAACTCTAAACTTTACGCAGGCGCGTTAGGTCCTAGT
CGCTATGCGTGTGCTTGTGGGTGAGGGAGGGCAGAAAGGGAGAGT
GCTGGGCGGGCTTAGTCGGAGATTGAGGACTGGGAATCCGCTTCC
GGGAGGGCACTGTCTAGTGCACAGGCAACCTGGCCTTGGCCTCCT
AGCCCGAGAAGCCGAATCTCCCTAATCCCTGTGACCTGTGTCACC
TCTGCATCGCGAGGAGGGGGATAAGTGGGGAGAAGCCTGGTGTCA
GATGGGATGGCGCCGGAAGAGGGTGCCACAGCGGGGACGGAAGGC
GCCCCCACCCCAACTCCACGGGAATATAAACAATTTGTATTTTCC
GATC

[0362] In some embodiments, the intronic domain that promotes trans-splicing primarily in the brain comprises or consists of sequences from the gene RTN1. In some embodiments, the sequences from gene RTN1 comprise or consist of:

(SEQ ID NO: 309)
GTATAGTTGCTTAAGCTGTTCACTTCACAGTCTTGACTGTTATTT
TCCCTAAAGGTGTAATACTGTAAACTGCTACATCAAGAAGAATAA
AAAGCAAGTGCTAATTATATTCTAGAGTCAGAAGACCTCCAGTTG
TATGGCACCATGAACCAGTCTAATCCCTTCATTGTACCAATGATG
AAAATGTGGCTGAGACATTTGTCCAGGGTTGCCCAGTGAGTCACT
GGCAGAGCTGGAATCAAACCCAGGTCACATAGCTTCTAGCTCTAT
AGTCTTTACAACACACCAGATTGTCTCCTTAAACCATTTTTAGTT
CCTCCGACAATTTCCCAAAATTAATATTAAGATAAAAAATCTAGA
TAGGGAATGTGAAAACCATATATACTTTTGCATTGAAGGAAACTC
TAGATTCTACTAATATTAATAGTAAGCCCTCCAAGTGTGCTTATG
TAGTTACAGCTCTGAGGCTAGAGGTATGCCCAGCCTCTCACTTGA
TGAG

[0363] In some embodiments, the intronic domain that promotes trans-splicing primarily in the brain comprises or consists of sequences from the gene RTN1. In some embodiments, the sequences from gene RTN1 comprise or consist of:

(SEQ ID NO: 310)
TATGGCCCAGGTCACTTGAGTTTTCAATGCTCTTTCTATAAACCT
GGAAGTAAATTCTAGAATTTAAACATGAATTCTTAGAGATCTGAT
GAGGAACAGTTGGCAGCTAGGATTTTGAGCTATCTCAACTACTTA
AAAAAAGATAATTTATCTCCATGAAGTCATGTGTGGAGAATTCAG
CAAATGAGCTGATTTGGCACTAATTTTTTTTCTCTGGTCCCAGCT
GGTTTCTCTGAATTTTCAGCCCACCCATGCTGTGTCTTAGGTAGC
CAGAAACAGTCACAATGCTCCACTGAGAACCATGCTTTCTGTGTT
CTCAGTGCATGGAAGCAGGTGTGTACGGTGCCCTGTGGCCCTCAC
TGGCTGGCATAACCCCCCAGAGATGACTCCTGCTCTCACCCTCAG
AGTGAGAGTAGGAACGCTTAGCTGTTACTGGGGTTCGGCAGCCTG
TCTCATGATTCCCTCTGACGGAATTTTCTGTGGGAATGGTTTGTT
GACA

[0364] In some embodiments, the intronic domain that promotes trans-splicing primarily in the brain comprises or consists of sequences from the gene SLIRP. In some embodiments, the sequences from gene SLIRP comprise or consist of:

(SEQ ID NO: 311)
ATAGATATTATAAAAAGTAAATCAGTGAAGTACAAGCACTGTAGT
TCAGAAGAGAAACAGATCGTGTAGTTTTTAGTCTTTAAGATTATA
TACTCTAAATCTTTGAAGTCTCACAGGGCTGGTACATTGTCTTGT
ACTGTGATAGGAGCCCAATAAAGTAATACTCAGTGGATGTACTTG
GTTTGGGTCTTGAAGGATAGTTATAGTGTTACAAGTTAGCCAGGG
GGAGATAGGATTACCAACATATGGAGGGGAGAGAACAACATATGC
AAAGAGGGTAACCCGCAGGACAGATAAAGATAATTCAATTAGTTG
TACTAGAGAGTAACTAGGGGCTAGCAGTGGGAAATAAGGCAGGAA
GGGTAGGTGAGGGCAACTCAACACATTTTACTAAATTGTGAAAGA
CCAGTAAGTTGGGATTTTATTTGGAAATCTTCAGTATACCGGGAA
ACACACTGGATTGTAATTTGTCTTTTTCTTCATTGTGATCTGCTC
ACAG

[0365] In some embodiments, the intronic domain that promotes trans-splicing primarily in the brain comprises or consists of sequences from the gene SLIRP. In some embodiments, the sequences from gene SLIRP comprise or consist of:

(SEQ ID NO: 312)
TACATTATGGCTTTATAGTCAGTACCATAGCTGCTTCCTAAATCT
TAAGCCTTTAAGGAAATGCAAAGTAGTTCCTGTCCACAAGAAATC
TGGTGACCCTGTCTTTCTACAGTCTAAGATAGAGAATCCAAAATA
TAGTAACTACTTTTAATGTTTTCTTCTGCCACACAGGTCAGCTGA
AAGAACACTTTGCACAGTTCGGCCATGTCAGAAGGTGCATTTTAC
CTTTTGTAAGTATTAAGGAAAAGTAGGTGGGAGGTGGGGATGGCT
AATGGGTACAAAAAAAATAGAATGAATAAGACCTATTTGATAGTA
CAACAGGGTGACTATGGTCAATAATAATTGTACATTTTAAAATAA
CTCAGAGTGTAATTGGATTATTTGTAACTCAAAGGATAAATGCCT
GAGGGGATGGATACCCCATAAGTCAAAGGATAAATGCTTGAGGGG
ATAGATACCCCATGCTCCATGATGTGCTTAATTTACATTGCATGC
CTAT

[0366] In some embodiments, the intronic domain that promotes trans-splicing primarily in the brain comprises or consists of sequences from the gene HSP90AA1. In some embodiments, the sequences from gene HSP90AA1 comprise or consist of:

(SEQ ID NO: 313)
GTAAGTGGACTAAGGTTTAAAATTACTATCCTAAACATTTCTAGC
TAATGTTAACCATCCATCCAACCAACCGGTGGTTGGAGTCACAGA
AAGCTAAAACAATGTCACTCTCTTTATTGTTTATTCCCTGCCTAC
CCATCCACTGCATTGACATCTACTGAGGGTCCACTACAGGCCCAG
GCAATGTCCAAGAGAGTCCCAGGTCCCTGCCTGGAGTGCATGTGA
CAATCATCATAATACAGGGCTATAGCGCATATATGACAAAGTGCT
GTGGGAGAAAAGAGAAAGACAATCCAATCCCTTGGGCTCCCAGAA
GAGGTGGCTTGTGAGCTGCGCCTTGAGCACCCACTCACGGAGGAC
AGCATAAGCAAAAGTGGGGAGGAATGTGGGCAGGAGGGGCGTGAA
GAAGCGGGCAGTGGGGTTTGGAGTGACTGAACCCTAGGAGGGTGG
TGGTGGCAAGAGATGATGGGGGAGTGTTGGAGGGGCCTGGGCAGG
CTAT

[0367] In some embodiments, the intronic domain that promotes trans-splicing primarily in the brain comprises or consists of sequences from the gene HSP90AA1. In some embodiments, the sequences from gene HSP90AA1 comprise or consist of:

(SEQ ID NO: 314)
TTGATGCATTTAGCTTACTTTCCTAAGGGGCTTTCAAGGGGGACA
CTTCCCCTGGATTCAATTTTCCCCTTAGCCACTAACTTTGAAACC
CAACCAGAATTCCAGACCCTTCAGTGCAGCTCTCCTGCAGTTGGT
TGAGTCATTAGGATAAGTCTGAATGGAGCCTGGAATAATAACAAC
TAAGTTCTAGTTTTTGCTGCAGGCCCTCTAGCCCAGTCCAAGAGC
ACCTGGCCACCCAGAGAAGCACTGCTGGAGTGGGGGATCAGGCCA
TACAGCATCCACAGAGAAGCCCAGCTCCTTACTGGGACCCTGGTC
CATTTCCCAAGTTGAACTTCCTGCAGGAAGAGAACATATCACATA
TTTTAATCCATTTGACAGTCACAGAGGAAGTCTAAGGAAGCCAGG
GCATGCCTGCTTGGGGCTGTCCAAGTTCATCCTCTGCCGCCCTAT
CTCTGTTATGTTTGGTTTGGAAGTCCAGAAGATTGTGTTTATGTT
CCCA

[0368] In some embodiments, the intronic domain that promotes trans-splicing primarily in the brain comprises or consists of sequences from the gene CRIP2. In some embodiments, the sequences from gene CRIP2 comprise or consist of:

(SEQ ID NO: 315)
GTCCCAGCTTCCTTGAGTGGAGTGGTTCTGGTCAGAGGGCTCTAA
GCTGGTGCAGCCTTGTGGTTGGGCTGGTGTCCTGGAGGCTGGCCC
TGGCCATGCCCAGAGGGTTGTACCAGGGCCACGGAGAGCCAGTAT
TCACAGCCCTCTACCTAGTAGGCCACCTGGGGGATCCCATCTCAC
TGCCAGGAGCAGCACCCTTGGGCCTCTCAGAGTGGGCTTCGCCCT
AGCCAGATGCCCCTCCCCGATATCTGCCAGACAAAGGGGGCTGGG
CCACTTGCTGAGAAAGGGAGCTGGGAGAGCCACTGGTCCTCGGCC
ACCTGAGGGGCTTGGCCAGATTCTGCCGGGCAGGGTGGGCCCAGC
CTGCATGCTCCCTCCCCCCAGGGCCTGCAGCTTGTCCCCTTCCCT
TCAGAATTCCGGCTCTGCTGGGCCCTTCCTGCCCCTCCCCACCTC
TTCCTGCCTGGCTCCCTAGGGAGGCCCCTGCTTCCATCCACTGGG
AAGC

[0369] In some embodiments, the intronic domain that promotes trans-splicing primarily in the brain comprises or consists of sequences from the gene CRIP2. In some embodiments, the sequences from gene CRIP2 comprise or consist of:

(SEQ ID NO: 316)
TGTGTGAGTGTAAGAGAAGTGTTTGAGGGAATGACAGGTGGGGGA
GATGCATATGTGTGGGGGGAGGCAGGTGTGTGGGGGGAAGCGGGT
GTGTGTCTGAGGAAGCGGGTGTGTGTGGGGGGAAGCGGGTGTGTG
GAGGCGGGCGTGTGGGGGAGGCGGGTGTGTGTGTGAGAGGAAGGT
GTGTGGGAGGAGGCAGATTTGTGGGGGGAGGCGGGCGTGTGGGGG
AGGCGGGTGTGAGGCGGGTGTCCGGGAGGCAGGTGTTGGAGCGCG
GGCAGGTGTTGGAGCGCGGGCAGGTGTTGGAGCGCGGGCAGGTGT
TGGAGCGCGGGCAGGTGTTGGAGCGCGGGCAGGCTCGAGCACAGG
CCCCTTCACCGCAGGCACTGAGGGGACTAACAGGGCAGCCCCGGG
CCCCTTCTCAAAGGCGGCTCTAGCGGGGTTCCAGGGCTGGGGGCG
CTGAGACCCAGAGGGAGAACAGGGCCTGGGGGCGACGGGCTCCTC
CGGG

[0370] In some embodiments, the intronic domain that promotes trans-splicing primarily in the brain comprises or consists of sequences from the gene APBA2. In some embodiments, the sequences from gene APBA2 comprise or consist of:

(SEQ ID NO: 317)
AGGGAGAGGATGGGATAAGCCTGAAGGGGAAGGTACCCAAGATAG
TCTTTGAGGGGTCATGGATTTAGATTGGGAAGAGTTATTGTCCCT
CCTCATTGGTCCTCATTATGTCTTCTTAATGAAAGCTGCTCATTT
TCTTCGTGAGAGCAAACAACCTGATCTTCTGACCATTTGTCTTGG
TCACCTGGGCTACCCAAACTGAGTGAGAAGTCAGGAATGAGCCGG
TAGGTTCCTGGGGAGAGGCGTGTGTCCTCGTGAGTTGCCGGTGCC
TCCCTTGACTGCTTTTCCCGGAGCTCTGTGTGCCCTCGTTCTCCT
TGGTGTGGATGCGTGTTGTTCTGATGATGAGTTAGCGGGGGTGGG
GATGGCGCACTGTTTGAACAGATGTGCCCTCACATGGCTGCGGGA
GGACGTGGTGGGAGGTGCTGTGGTGAAGTGGCCCCACACATGGCT
GGGCTTTGTGGGGTTTTGACTCTGTCCTTCCCAATGTTCCTCCCC
ACAG

[0371] In some embodiments, the intronic domain that promotes trans-splicing primarily in the brain comprises or consists of sequences from the gene APBA2. In some embodiments, the sequences from gene APBA2 comprise or consist of:

(SEQ ID NO: 318)
TAGGACCCTGGCTGTCCTGGGGAAGGGAGCAGAGGGGCCCGAGAG
CAAGGGACCTCAGGGTACAGGCCTTGCAGATGCTGAAGCGAGGCG
GTGGGGGGTGCTGGGTGCCTCACAGTTCTAATGGTGGCTGAGCTC
TTCATTGGTCCAGTTGGGAGACATGTTGCGTGGATGCTCCGGCCA
CTCTTAAGCTCACCGCTCAGACTCAGGACTAAAGCCGGTTGAGGG
CTGAGTGGCAACTCGTGTCTCGCAGAAGACACCCCTCCTCCCACC
CTAGAAGAGAGGTTCGATTTCTTGCCCACTGCCCTGGTCTGCTCA
TGGTGGGGCAGTATGTGTGGGAGAGCCCCTCAATCCTCAGGGGTG
TACTCAGACCAGCAGGGCAGTGGCAAAGACGTGGGGGTGCTGGTG
CTCACCCACTGCTGCGGCCAGTGTTGGGTGGCCTGGTGGCTGGGG
TCGGGGCCAGAGTGCATTTCACAATGGACGGGTCTCTGAAAGCCC
GGGG

[0372] In some embodiments, the intronic domain that promotes trans-splicing primarily in the brain comprises or consists of sequences from the gene SCG5. In some embodiments, the sequences from gene SCG5 comprise or consist of:

(SEQ ID NO: 319)
AATGTTTCCCTGCCACCACTCCCAACCTTCCTGAGCTTCTTGATT
TGTGTCTTCCTGACTCCCTCCTGTTAGACTTTTATTCCCAGAGAC
TGGGAAAACCCAAGATGCCACTATCTCTTTCTCAAAATGTAAGCA
AGTTTGGTTTATTTGTTTTAGTAAGAGAGGGAGAGAGTGATGAAG
TTAGGAGTAATGCAGAACTTTCAGGGAGCTACAAGGAGGATAAAA
ATTATGAGTGAGAACCGCCATTCCAGCCTAGCTTTCTCAAGAATG
CAAACAGAGGGAATTGGATACCTGCAACTGTTTTGTTTAATACCT
TTCTGCAATGATGCTCTGCCTAGCATGGAAACTTAAGACAAAAGC
AACCTCCTAAGGATTCTTTGTTACAACCCCTTTCTGGGTGGTCCT
CGAACCACAACCTGGAGTGGTTGCATCATTATAATTGTATTATCA
CAATTGCCGATTGTAGCCTATCAGTATACATTTGGTCTTTTATCT
GCAG

[0373] In some embodiments, the intronic domain that promotes trans-splicing primarily in the brain comprises or consists of sequences from the gene SCG5. In some embodiments, the sequences from gene SCG5 comprise or consist of:

(SEQ ID NO: 320)
TATTTACTGTGTTCTGATGGTTTGAAGTTTCCGTTAGCATTTTAA
ATAATATATTTGCACACTTCTCACAACAACCTTATAAGTAGATGC
CTTTATTATCCTATTTTTTTCAGAGGAGGAAGCTAATTTTTAAGA
GACTCTACTTTCTCATGGTTTTCCCTTTCTTCTTCTACACAGTGT
CTACATACTTACATATACACACCCACATGAGACTATAAGTCCTGT
GAGAGCAGGGACCTTATCTATCTAATTCATAGCTGTAGCCCTAGC
ACCTAGCACAATGTCTGGTACATAATAGGTGCTCAATTAATGTTT
GTTGAATGAATGAAGGAGCATCTAGTGTTATCACTAAAGAAAGAT
TAGAACCCAGACATGATGTTTTCTCCTCACTGCTGATCTTCAGGA
AATTGTGTCATCAGATAGCTGCCTTTTGAGTCAATGCCAGCCAGT
ACTTGTAAAAGAGCTTCAAAATGTAGAACCTACAGGATCTGACTT
GATT

[0374] In some embodiments, the intronic domain that promotes trans-splicing primarily in the brain comprises or consists of sequences from the gene SRP14. In some embodiments, the sequences from gene SRP14 comprise or consist of:

(SEQ ID NO: 321)
GTGAGAAACAAAGCTTTTTTTTTTTTTTTCCCCAAAAGGAGCCTA
CTGCCTTTCACCTCTTGGTGCAATTCTCATGTGGAAAAAGATGCA
GAGCTCCTTTTCTTGTTCTCTAGGCAGAGGAAAGTAGAGTAGAAA
AATAACCATTCGTGTATTATGAACCCTGAAGTTGGGGAGAAGTAT
TTTAAAGATAAGGATATTGTCTTCCGGAGGCTTTTGAGATACTAT
CTGGGGTGGAGAAGAGGATGCTTATATGGATAATAGGTATGACCT
CTTTTTTCCTTCTTTTTCAGGTGAGCTCCAAGGAAGTGAATAAGT
TTCAGATGGTGAGTTTTGGGTGTTCCTTATGTTTCCCTTCTCAGG
GCAAGAGTCAGTATGATAGTGAACACTGGGTAAGATTGATACTTG
GGTTCACTGCTCTCCGGAGATAAGTTTTACCAGTATGTTTCAAGT
AAAAGCTGCCAGGGTGTGAATTTCAATGCTAATACCGTCTTCCTT
TCTA

[0375] In some embodiments, the intronic domain that promotes trans-splicing primarily in the brain comprises or consists of sequences from the gene SRP14. In some embodiments, the sequences from gene SRP14 comprise or consist of:

(SEQ ID NO: 322)
CTAGTCTTTCAGTGGAGGTTGAATAAGGCAAAGGAAGAGGCTCCT
TGAATTGAGTGAATACTACTTTATTCTGCTGTGGCAGAAATCACA
TTAGTGTAGGATACTGACTGCATGAAAATGTAGACTATACTTAGT
TGGAAGTCTTGAGTTATCTTGAGAGGACTTCTACAGTAAAACAAG
CTTATGTGGTTTTACAGATTAAGTTAGATATCATGAAATAACAAA
AACCTAAGGACAAGTTATCTTGAGAGGACTTCTACAGTAAAACAA
GCTTATGTGGTTTTACAGATTAAGTTAGATATCATGAAATAACAA
AAACCTAAGGAGTGTTCTTCAGAGGTAGAATTTATTTTGTGGTAG
CTCGCATTGTGCTTAAATATGCTTGAATTAATGGAAGGCAGGTTT
AAAAATAAGATGGGGAGGGAGTAGTTTAAATATATCTTCTATTAA
TGTATAAAAAATTAATACTGAGAAGTCCTCTGACTTTTCTCAGAA
CCCA

[0376] In some embodiments, the intronic domain that promotes trans-splicing primarily in the brain comprises or consists of sequences from the gene SHF. In some embodiments, the sequences from gene SHF comprise or consist of:

(SEQ ID NO: 323)
GTGGGTCCTGGGGGGCTTCTGGCCAGGGTGACATGTCCTCACCCC
TCCAGGCCCTGTGGGTTGGGTTGGAGGAGCTGAGAGGTGGGGCAG
GATTTGGAGACCCCAGGAAGAATCTCATTTGGGAAGAAGGAAGAG
ACAAAATGCACGTTCCTCCCTTCCCCACAGCTGTGGGATGGTGTC
TTCTACAGGGAGGCCCCTTTCTAATGTGTTCCTCACCATGCTACA
AAAATCCACCATTTTAAATTCACTTTGGGGAGAGCTTTGCTTGAC
AAGCTCCTTCAGCAATGCAAATACTCCTGAGCTGGGGGTGGGACA
GACACAGCAAGTGTGGAACTCCTTGGCGCAGAGGAGCAGATCTGA
CCTTGCATCTGGTGACTGAAAGAGAGTAAGGGCTTCAAAGTGCTA
CAAGGAGAGAAAAAGAGCCCAAATGAGGAGAAAGAACGCACTTAA
TTCTTCCTCTATGTTCAGTTCTGCCCAGAATGGGCACCCAAGGGT
GTGT

[0377] In some embodiments, the intronic domain that promotes trans-splicing primarily in the brain comprises or consists of sequences from the gene SHF. In some embodiments, the sequences from gene SHF comprise or consist of:

(SEQ ID NO: 324)
CCTCAAGTCTGAGTAATCCTGACAACCTGAGGCGAGGCTGGCTCT
TTCTTGCTGCCTGCGAGTTCCCAGGCTGTGGGGAAAAGGAGAAAG
GGAGGCAAGGCTGTGGGTGCCAGGAGGCTATGGGAACCCAGATGT
GGTGTTGGGAGGTGCTGGTCACTCTTAGTCCTTCATTTCCTTTGT
TCCTGGTACCTTTGGGCCCTGGAGGCTTGTGAGAGGTCAAATGAA
GGGGACCCACGGGCTGACAGTGCAAGCCCCTGCATCCTGCTGCTT
GCCACCCAAGCCTCCCTCCCTCTGACCAGGCCAACCTGGTGTGGT
CAACGTTGGCTCTGCCCAGCCCTTGAGTGCCTCCCCAAAAGCTGA
CCTGCCTCTGCCTCTGCCTCTGCCCCTCCTCATTTCTAGGCTGTC
CTGTGTCCTGGCTCTGGGTTTTGGTGTCTCAACCTCTACCTCTTT
CTGTCTCTGTCACTGTCTGTCTCTCTTCTCACTTCTGCTGCTGGC
TCCA

[0378] In some embodiments, the intronic domain that promotes trans-splicing primarily in the brain comprises or consists of sequences from the gene DUT. In some embodiments, the sequences from gene DUT comprise or consist of:

(SEQ ID NO: 325)
TCCTAGCCAAGGGGTTCCCACTGCGTTTCTGTTGGGTTATCCCAA
ACCTGTGATAGGATAGTAGCGCCCTCCCTGCCTCCGGTCGAATAA
ACACTACAACGTCTGACACTCGGTGCTGAAAGGAAATCGGGCGCG
GTGTCTTGCCCACAGCTTGGGGAGCGGCCCCGGGCGCAATAACTG
TCACCGGCGCCGAGATGCGGTTCCGGCGCTTAGGGCGCCGCTAAA
CTCAGAGCCCGGGAGTCATGGCTGCGGGCGGTGCCGCCCCAGGTA
AATCAGTCCAGGAGCAGGGCCCGGGCCTGGCGTACACTCTCGGAA
AAATGGGGGCCAGAGCAAACAAGAAGAGCGAAAGCAAGAGGGCTA
GGCAGCCAGAGGCGGCAGCAAGACTCAAGACGCCAACGGCGCCGT
CTTCCTGGGGCCCCAGGGCCTGCGCCATCCCTGGGCTGCCGGGGC
ACCGCCTCTCCACGCCCCTCGTCCGGCGGCGGCTGCGACTGCTTC
CGAG

[0379] In some embodiments, the intronic domain that promotes trans-splicing primarily in the brain comprises or consists of sequences from the gene DUT. In some embodiments, the sequences from gene DUT comprise or consist of:

(SEQ ID NO: 326)
TGCCGAGGACCCAACCAGCCCAAACTCTGGGGGAAATGACTCCCC
TCTGCCCTCGCCCCGCGCTCTGCTACCATTTCCTTACGTCTCTGC
TTCGCTCAGCGATGCAAAACGCGCGAGGCGCACGGCAGAGGGCCG
AAGCCGCGGTACTCTCCGGGCCAGGCCCGCCCCTCGGCCGCGCCG
CGCAGCACGGGATTCCCCGGCCGCTGTCCAGCGCTGGCCGCCTGA
GCCAAGGCTGCCGCGGAGCCAGTACAGTCGGGGCCGCTGGCTGGA
AGGGCGAGCTTCCTAAGGCGGGGGGAAGCCCGGCGCCGGGGCCGG
GTAGGAAAGGCGGGGGAGGGGCTCCGGCCGTCTGGAAGGAATCCA
CGCGGCTTGAGGCTGTGGGGGAAGTAGGGTGGCGAGCGGTCCTTC
TGCGCGCGGGGGGCGGGGGGGGTGGGGTGGTCCATTAGGGTCCCC
TGGCGAGGGGGCGGCTTTCTAGTGTGTGAGGGCGACGCCCTAGAA
GCTC

[0380] In some embodiments, the intronic domain that promotes trans-splicing primarily in the brain comprises or consists of sequences from the gene SPG21. In some embodiments, the sequences from gene SPG21 comprise or consist of:

(SEQ ID NO: 327)
GTGAGTCTCCAGCGGGAGGTGGGGGCGGCACAGGGCTTAACCGGG
GCATCCTCCTGTAAACCCATCCTGGGGCTACACGACTGCAGCCCA
GGAACATTTCTTTCTTTCTTTCTTTCTTTTTTTTTTTCTCAGCAA
ACTTTTAAGAACTGTGAGCAGAGGCCAGTAATTTTGGAGACAGGA
CCTCGGCCTGAAAGTGATAGATGTCTTTGTTGTTACTGAGTGTGG
GCCAGGTGTAAGGTTTGTAAACGGGGGATGAGGAACAGAGCGGGA
CCGGAGTGTCTCATTTTTCCTCTTCTCGTTTTCCTGGGGAGTTAT
AAGTTAGACATTTATGCTGCTTCCTTTGTCTCCACCTACACTGGT
TCAGCTCCTTTTGGCACAAAGATTCAACAAATTAAGGAGTAACTT
TTTTTTCATCCCAGCTCACTGCAAGCTCTGTCTGCT

[0381] In some embodiments, the intronic domain that promotes trans-splicing primarily in the brain comprises or consists of sequences from the gene SPG21. In some embodiments, the sequences from gene SPG21 comprise or consist of:

(SEQ ID NO: 328)
TCCCCCCGCGCCCGTCGCCGTGGCGACCGCCGGGGCCACGCAGCA
CCGCCCCTTCCTCGCGACGTGGCCCCGCCCTCTGAGAACCCGGAA
GCGGGAGTCTCGCGCCAGCTGAGCGGCGGTCGGGCGGGGGGAGCG
CGGCGGCCCAAGCTCGCTCGGCCACGCGCCCCGCCCCCTCAGAGG
CCGGCCTCCCGCACGCACCGCGCAGCCTGCTGTGCCCGTGGGTCC
CGAGTGCTCCGCCGCCCGCCCCGACCCGGGCCCAGCCGCCTCCAC
GGCCCGCGCTCGTACTGGAGCGAAGAGCGGCCTCCTGAAGGAGGG
GAAGGGACGTGGGGGCGGCCACGGCAGGTGAGGGTGGGCGAAGCC
CTGGGAAGCGGCTGGGTGTGCGGTATGCGGGGTTGTAGGTGTGTG
TGTGTGGCGCGTGGCTGCCTTGGTTGGTGTGACTTTGTGAGTGTG
TTCTGAGTGGGCCGGTCCATGTGACCACGCACGTGATCACGTGCC
CTTG

[0382] In some embodiments, the intronic domain that promotes trans-splicing primarily in the brain comprises or consists of sequences from the gene PKM. In some embodiments, the sequences from gene PKM comprise or consist of:

(SEQ ID NO: 329)
GTAAGGGCATCCCTTGGCTTCTTAATCTACGTACTCCAGACCCAGG
GCTTGGACCTTTGCTGGTACGGGTTAAAGTGAGGCCGACAGTGAA
GGTCCACGTGGAGAGAGACATTGGGAAGTTGTCAAAAAGGCGTTT
AGAATCAGGTTTGACTCATTAATTTCCTGAGACTCTGAAGGAGTT
CAGCCTCTACACCTCAGTTTCCCCTGGGAAAACTGGGAGTAACAT
TTTCCTCATGATGGTTGAAAGGATTCATGCTTACGTGGATGTGGC
ACACTCAGTAAGTGTCTAATCTCTGGCGAAATACCCAGAAGAAAA
GCCTGTGACTGAATATATTATTTTTGAGCACAATTACTTAGTCCA
CAATTGAGCATAAGGGCCTTGATCCATTGTCTTCCTACTGTCCCC
AAACGCCTACAGCTAATCGTGAGGAATCAGGCTCTCTGAATAACC
ACGTGTCTCCTGGAAACCAGTTCCCCAAGGGATCTGGTTTAATAT
TGA

[0383] In some embodiments, the intronic domain that promotes trans-splicing primarily in the brain comprises or consists of sequences from the gene PKM. In some embodiments, the sequences from gene PKM comprise or consist of:

(SEQ ID NO: 330)
CGGTGCCGTCCCCTGTGGCCGGGATTAGATGGGCGGCCTGCGAGG
GCCTGGGAATGGCTCGGGGCCCGAGAGCTCGACCGGCCCTTGCCG
GGTGGCCGCCAGGGACCACGCTCCATCTCGCCGCGGCCGGGCTGC
ACGTAGCGGCCGCGCCCAGGGCCCACCCCGCTTCACCGGGCGATG
GCCTTGGGCCTCGTAACGGGCGGGATAAACCTCTGCAGGCTTTGC
TGGGGCCTCCTGGCCCTCGCCCGTTCCGCGCCTCTCCGGCACGTT
TCTTTCTTTTCCTTTCTTTTTTCTTTCTTTTTTTTTTTTTTAATT
ATCCGGCACATTTTTTAACAAATGCGTCCTGATTGTGGAACGCGG
AGGCCGCGGGGTGGGGTGGGGATCTGGTTACGGAGGGGGCAGGAA
ATCTGTCGCGTTCACTGAACGCAAACGGTGTGGGTCAAGGGCTGT
TTGGGGGTCAGAGTTAGAGACCAGGATGACTAGACGAGTCATAGC
CCAC

[0384] In some embodiments, the intronic domain that promotes trans-splicing primarily in the brain comprises or consists of sequences from the gene NPTN. In some embodiments, the sequences from gene NPTN comprise or consist of:

(SEQ ID NO: 331)
GTGAGTCCAGCACCCTACAGTAGTAGTACTGTAGTCATTAGAGGT
GGCCCAATGACCCTTCCCTTCTGCATCCTTTCCCTCTTCCCCAGT
ATGATCACTCACCCCACCCCTTGTCTTCGTTTTTTTTTCAATCCC
ATGACCCTTCTGGTTGTAGTGTATGAAAACATCTGTGGCAACTTT
TTTTCTTCTTTTCTTTGCCGTTCTCTCTGCCTCCCTTATCCCCCA
ACCCTTCTCTGTGTCTTTCTTCTCAGGAACAAAGAACTTGAGGAA
ATCCGTGACTGTCCAAAATCATCTGTGTTGGGAAGAGTTGGGGAG
GGAGAACTGGGAAGCTTAAATTAAAACTCATAAAACCAGGCAGTC
CAAGGAGGGTAGTGTTGAAATGGTTTTCCCTCCCCTTTGATTTTG
TAGTAGGTTTCCTGCTATACTTTTGCTGATTTCTTCTCTGGTGCC
TTTCTATTTTTGTTTCTCTCCCCAGTCTAACTACTTTTTATTTCT
TCTG

[0385] In some embodiments, the intronic domain that promotes trans-splicing primarily in the brain comprises or consists of sequences from the gene NPTN. In some embodiments, the sequences from gene NPTN comprise or consist of:

(SEQ ID NO: 332)
TTGTTGAGGCTTGCAAAAGACACTGCATTTCTAACAAAGCGTTTG
CCCATCCAAAAGAGAGATCCTGATTTGGCATATAAAACTACTGCC
TCTTCTGGTTATCTTTCATCACTTGCCTGAGTTTAAAAAGGTAAT
AAATGGTTTGTGTTCTAAGGAAAGAGGCTCTTCCCAAGACCTGAG
GCTTTCTCATTCCTACCAGCTGGGCCCATTGCTAAAATGCTTTCC
AGTGGGCTTGCTTCTGCCTGGCCAGCACCTGGGCTGCCCCAGCTT
GTAATTAGCCTGCCTTTGCTTCATAAGCTTCCCAGGGTGTGGTTC
TTCTTCTAAAAGCTTGTATGAATTGCTGTACTGTCTCTTTATAGT
TTAAAAATGAATCCTTTTTTGTTCTTTGCAACTCATTTGCTTTTT
TCTTTTCTTTTCTTTAAATTACTATTAACACCTGTTGATTCTTTT
TTTTTTTTCTGATTGGCCTGTCACTGCATTCCTGCTCCCCCTCCC
TCTA

[0386] In some embodiments, the intronic domain that promotes trans-splicing primarily in the brain comprises or consists of sequences from the gene COMMD4. In some embodiments, the sequences from gene COMMD4 comprise or consist of:

(SEQ ID NO: 333)
TACCTGGGTGCTGGTTATGTGAGGTGTACAGTTGATGAAAACTTA
TTAAGCTTTATAATAGGTACAATTTTCTGTATGTGTAGTAGACGT
CAATAGTTTTTAAAATGTCTTTTGCCACAGCCCGCAGCTGTGAAT
AATGCTATTCGCTTAACAGTGGAAAACGTGTCAATGACCTGAAAC
ACCCTGGCTCCCGGGATCCTACCCCCTTAAGTTAAACAAATGAAA
TAACTTCCACTGTCTTTCCTAATGTCTTAATTCGGTCCTCAGTTA
AACTGGCGGTTGGCGCCAGTTTTTTCCAGGGAAGGATTCTGGGAG
ACGGAGGAGGAGACGCCAGCATTTCGCCCCCTGCACCTCCAGCGG
GCTGCGGTCCGCTCCCGGCCTCACTCGAGCAGGCCCCGCCCTCCC
AGAGGCAGTTAGTCCAAGTCACGTGATCGTCGACTCAGCTGACCC
TGCGGGACCGGAAAAAGAAATTCCCGGGCCCTGGCTTCTTGGCGC
GATG

[0387] In some embodiments, the intronic domain that promotes trans-splicing primarily in the brain comprises or consists of sequences from the gene COMMD4. In some embodiments, the sequences from gene COMMD4 comprise or consist of:

(SEQ ID NO: 334)
TAGGGAAAAGTCCACCACTCTCCCGCTCCCGAGACGGGGGCGGGG
GTACGGGGCGGGTAAGACAGAGCAGGCCGGCCGGCTTAGAGTCCC
GGTGCTTCCCTGGCGGAAGGAAGGGCCCCTGCCTCCCGGGGCAGG
AACTAGGGCTTGTCTGGAGCTGGGAGTCCTTTCAGGTCTTCCCCA
TCCCCAAGAGGACCTCCCAAGGATACCCCCTTCCCCAGCCCTGCC
GTGGGGCTTGTACAAGAAGGTGCTTAGAATCAGGCTCACTCTTCC
ACACTGTTAGGAAGCCCCTCCGCTCTTTCCAGAGCCAGAAAGTAG
TAGTTTTGGGGTTGAGACTTATCCATCCATCCATCCAATCCATCC
ATCCGTACGTTCTAAGCGCCTGGTCTATACCATGAAGTGTGCTAG
GCACTGGGAGGACTTGAGCTGCCAAGGGAAGGGGAAATCGGAGGC
TTGAATTGGAGTCATAGCTAAGGCTCCAGGGGCAGAGACCTAACT
GCGC

[0388] In some embodiments, the intronic domain that promotes trans-splicing primarily in the brain comprises or consists of sequences from the gene MORF4L1. In some embodiments, the sequences from gene MORF4L1 comprise or consist of:

(SEQ ID NO: 335)
CTCCGCCTTAACCTCCCACGAAATCAAATCCCCGCTTTACCAACC
CGCAGCAGCCGGGGGCATGGAGAGAGAAGCGGGGGTGGGGTGGGG
TAGGGTAGCCGGCCCCTCCCCCACCCGGGGGGGGGGGGGGGGCGC
CTCCACCGACTCCGAACTACCAGTCCCGGCGTGCCCTGGGGCGGC
GCGGGCGCAGGGGCGCGTGCGCGGCGGGCTGTCGTTGGCTGGAGC
AGCGGCTGCGCGGGTCGCGGTGCTGTGAGGTCTGCGGGCGCTGGC
AAATCCGGCCCAGGATGTAGAGCTGGCAGTGCCTGACGGCGCGTC
TGACGCGGAGTTGGGTGGGGTAGAGAGTAGGGGGCGGTAGTCGGG
GGTGGTGGGAGAAGGAGGAGGCGGCGAATCACTTATAAATGGCGC
CGAAGCAGGACCCGAAGCCTAAATTCCAGGAGGGTGAGTGTGCGC
CTTTGGGAAAAAGGCACCTAACGGCGCAGGAGATAGAGGCGGGCT
CGAG

[0389] In some embodiments, the intronic domain that promotes trans-splicing primarily in the brain comprises or consists of sequences from the gene MORF4L1. In some embodiments, the sequences from gene MORF4L1 comprise or consist of:

(SEQ ID NO: 336)
TGCGTCATTGTGAGAAAGCGCTTTGTGAAGCGAGAGTGCTGCGCA
GGCGTTAGAGTGGGAGAGAGAGCGTTTGGCGCGTGGCACACCCTC
GTCAAGTGTTTGTTATTGTTCTGAGGAAGAGGGCGCGGAGAGAGC
AGCCTATTGTAGGGAGGCGACGGGAGCGCCATGGCGGCGGTTAGG
GGAAGTGATGTGGCGGCGGGGGGGGAGGGGCGGTGGCTGTTTCGG
GCGGTCCTGCGGCGCGCCCGGCCGCTTGGGCAGCTACGACGGGTT
TTTCGGTGCTTCCTGGAGCCCCGGGGTGGTTGCGTTCGGTGGCAA
CTCAGCTGCGGATGGGGGTGGGTTTGGCGCCACGGGGCGGGAGAA
GTGCGTTGTAAAATGGCCGTTGCAAGATGGCGGCGCCATCATGGC
CGCCGGCGTCTCGGTCCCGTATGGAGGCACAGCTTACGGGCAGAT
GCAGCGCCCCCTTCCACGACGACCAGAAGGTTGCCGGGGCCCTCC
GCAT

[0390] In some embodiments, the intronic domain that promotes trans-splicing primarily in the brain comprises or consists of sequences from the gene AP3B2. In some embodiments, the sequences from gene AP3B2 comprise or consist of:

(SEQ ID NO: 337)
GCTGCTGGCTCACCTTTCCTTCTAGGGGTTTGTCAGGAACAACTC
TTGTTGAATCCCCAAGGTAACCATCTCTGGGTCAGGATGCCTAGG
AGTCTGCAGGCATCTCTGTGGAAGAGACATCTGGGCTGGGGTGGC
AAGGCAGAGCTGGAAGAGCACCTTGGTCCTTTTTATAGCCTCTGC
AAAAACAAGTCCTCTTCAATGGCTGGCAGACCCCCTTAGTTCTTC
TTACGGTCCCTTGGGAAGGAAGGACTCATAACATGGGGACTTCCC
CAAACACAGGTGCTCAGTTCAACATATGTCAACTACTCCAGTTAG
GGGGCCTGGAGGCCCCACCTGGCTGGGGTACTGACCCACTGGTCA
TCTTAGTGGAAGAATAGAAGATGCATAACTGTACTTCTCAAACCA
CTTTGTGGCAAGTCACCTGGGGATCCCATCACATGCAGATTCTAT
TAGTAGGTCTAGGGTGGGGTCTGAAATTCTGCATTTTTTTTTTAA
GTGA

[0391] In some embodiments, the intronic domain that promotes trans-splicing primarily in the brain comprises or consists of sequences from the gene AP3B2. In some embodiments, the sequences from gene AP3B2 comprise or consist of:

(SEQ ID NO: 338)
GATAAAGGCCTGGGTGGGAGGGGTAGAGAGGCTGACAAAGGCTTC
CTGAGGGAGGGCCCAGTCTGAGAGGGAAGTACCTTCTCCCCAAGA
CTGATGATTTAAATTCTGACCTGCCCTTTGCATGATACCTTCCCA
GCCTGGGAGAACTTGTTGCTCAGTAAGCAGACCCAGGTGCTGGCC
TCTGTACCCACCATGGCCTCTGCCCTCATCACGACCTCTACCCCC
AGGAAAGCTGATGGGCATGAATGAGATCACAGAGAAACTCATGCT
GCCAGACACCTGTCGGAGTGACCACATTGTGGTGCAGAAAGTGAC
TGCCACTGCCAACCTGGGTCGTGTTCCTTGTGGGACATCTGATGA
GTACAGGTACTAGGCCACCAGTAGAGGGGAAATGATGAGCATGGG
GGCCCTGGTTTGAAGGAGGAGCCCCAGCTGCTGATCCCCTTCCAA
ACACAGTCACCCTTAGCAGCTCTTCCTCACCCCTTCTATTCCCAC
CTCA

[0392] In some embodiments, the intronic domain that promotes trans-splicing primarily in the brain comprises or consists of sequences from the gene SEC11A. In some embodiments, the sequences from gene SEC11A comprise or consist of:

(SEQ ID NO: 339)
GTGATTATTTAAACTCTCCAATCTCTTTGAGTCTTTGTTTTTCCT
CAAATTATAAATGTACAGATTCATGTAGAAACATAAGAAAATATC
AATAATCAAAAAGCAAAGTCACTTCTTGTCTCCTTTTTCTTGATC
TCCATAAATATTTACTATTAACTTTTTGGTTTATATTAGCCTTTG
TGTGTAGAGATAAAAATATTAATGAGTACTTTTTTTTGCCTTTTT
TTTTTTTGGAGACAGTCTTGCTCTGTCACCCAGGCTAGAGTGTGG
GTGGCATGATCTCAGCTCACTGCAACCTCTGCCTCCTGGGCTTAA
AAGATTCTTGTGCCTCAGCCTCCCGAGTAGCTGGGATTACAGGTG
TGTGTCACCACACCCAGCTAATTTTTTGTATTTTTAGTAGAGATG
GGGTCTCGATATGTTGCCCAGGCTGGTCTCAAACTCCCAGCTTCA
AATGATCCACCTGTCTTGGCCTCTCAAAGTGCTGAGATTACAGGC
ATGA

[0393] In some embodiments, the intronic domain that promotes trans-splicing primarily in the brain comprises or consists of sequences from the gene SEC11A. In some embodiments, the sequences from gene SEC11A comprise or consist of:

(SEQ ID NO: 340)
CAGAACAACCCTAATATTCCCATTCTACAGATGAGGAAACATAAA
TGAGTTAGGTTATGTATCTAAGATTATACTGATGGTCGTAAGTGG
CTGGCTGCATAGTCCACCTTACCATCATACAAAAATTACTAGCGT
AACATTTCTGAAATGGATAGTTGCTAATTCTCACTAGTTAGATGC
CACATGGCACTTTTGCCACTGTCAGAACCTCTGCTCCTTTTGACC
TAGAACAGACTGTATGGATACAGAGTTATTACACCAGTAAGCAGG
TCTGAGATACGCAGTTCCCATAGAGAAGGAAGTATGAGTTGCTAA
GTGAAAGCTTCCTCAGTTACAGCACGAGAGATGCTCAGTTTGGGG
CCAAAGAGATCAGATCAGAACAGGTATCATTGTGCTTTGCCTGCT
GCAGAGCTGTGGTTGTTATTGTTGTTTTAATATGTCCCCGCTTTA
AGGAACTTTTCCTTTGATGGAGCTAAAAATACTTTTATAATCCAA
ATTA

[0394] In some embodiments, the intronic domain that promotes trans-splicing primarily in the brain comprises or consists of sequences from the gene PRC1. In some embodiments, the sequences from gene PRC1 comprise or consist of:

(SEQ ID NO: 341)
GTTAGTACAAGAGTGAGGTCTTTGGTTTGTTTGTTTGGAGACAGG
TCTTACTCTGTTGCCCAGCCTAGTCTCAAGTTCCTAGGCTCAAAC
AATCCTCCCAACTTGGCCTCCCAAAGTGTTGGGCCACCACACCCA
GCCAAAAGTGGGGTCTTCATGTGGCCTGCTCACTAGTTTTTAAGA
CATCCAGACATTCAACAGGAAGTATATCCTTTTCTGAACAGATAA
AGCCACCTTTTCAAGACATTTAGCATAATTGCCATTCCTGTATGA
AAAAGCATTTGCAAATTTTATTGGGAAATATTGGTCTCTTGCTTT
CTGAAGCAATATGTCACTGTAGCCTCTAGCTGTGAAGCTTAAGTT
TTTATCAGGTGCTTACTTTTTGCCAGGTGCAGTGTCAAACCCTTA
ATATTATTTCACATCCTCATGTCAAGAGGTGAGGATACTAAAGCA
CATAAATGCTGAGTCATTTAACCCAGAGACATATAATGGTAAATG
CCAG

[0395] In some embodiments, the intronic domain that promotes trans-splicing primarily in the brain comprises or consists of sequences from the gene PRC1. In some embodiments, the sequences from gene PRC1 comprise or consist of:

(SEQ ID NO: 342)
AAAGCGGTAAGAAACCCAGTGGGTACTGGGTCAGCAGTCTTCTCT
TAGCACTTCTGTGTTAGTCATAAAGACTGTTGTTGATTTGGCCAG
GCTCAGTGGTTCATGCCTCTAATCCCAGCACTTTGGGAGGCCGAG
GCAGGTGAATCATTTGAGGTCAGGAGTTCGAGACCAGCCTGGACA
ACATGGCGAAACCCTGTATATACTAGCCAGGTGGTAGTGGCGTGC
GCCTGTAATCCCAGCTACTTGGGAGGCTGAGACAGGAGAATCGCT
TGAGCCTGGGAGGTGGAGGGTTGCAGTGAGCCAGAATCGCGCCAC
TGCACTCCTGTCTGGGCGAGAGAGTGAGACCCTGTCTCAAAAAAA
AAAAAAAAAAAAAAAAAGTGTTGATTTATAATACCTTTGTGGCTT
TGCATTATAATTTTACTTAAAAGGGGGGGATCTTTTGCAAACCTG
AGTGAATATAAAACTATGGCAGCCACCCTTAACAAGTTTCTTTCT
TTCA

[0396] In some embodiments, the intronic domain that promotes trans-splicing primarily in the brain comprises or consists of sequences from the gene MT3. In some embodiments, the sequences from gene MT3 comprise or consist of:

(SEQ ID NO: 343)
TAGGCCTGGCTCGGCCTCAGGCTTATTCTGGGACCCAGGCACATT
TCTGCTTCTCTGGCCTCACTTTTTCTTATCTGTATAATGGAGGGT
TAGGAGTCAAGGATCTGAAGATGCCAGGCAGGACAGCGGGGAAAT
GGAACACGCCCCTTGCCAGTGACACTCGGAGGGCGCAAGAGTCAG
TGTCGGGCTCATCGTGAGCAGGTTCTTTCTGCCCCCAGTTCAGCA
ACCCGTCTGAACAGATCTGGCGTCCTGGAGAATTCTAGAATGAAG
GGGAAGAGAGGCAGGGAAGAGCTGGGAAATACGCAAAGCGCCTTT
TTCTCCACTTTCGGAGATGGTACGTGCGCGCTTCCACGCAGTGGC
GGCTGCTGCGGCGAGCACGTCCCCTGCGGGACCCACGCGGGGAGT
GGGCTGGCAGTGCGCGCACAGCGGCGGCGAGTGGGTCGTGCACGC
GGATGCGGGGTGGGAGTGGGGGCGCACGCGCGGGCGTGGGCGAGC
GGGC

[0397] In some embodiments, the intronic domain that promotes trans-splicing primarily in the brain comprises or consists of sequences from the gene MAPK8IP3. In some embodiments, the sequences from gene MAPK8IP3 comprise or consist of:

(SEQ ID NO: 344)
CTGTCAGGCACACCCCAGAAGTCAGGGGTCCTTGAAGCCCCTACG
AAGCCCAGCCCGGGGTCCCCTCCCCACGTGGGTGGACAGGCCGAG
TCCTGCTCTCTGGCTGCACAGCAGGAGGCTCCGAGGCCCCACCCA
GAGGCTGTCCAGATGCAGCCCCCCAGCCTCCAGGCACAGCCCATC
CCCACAGGGGTGCCTTCTGCCCTCAGCCCCACCCAGCCCAGAATT
TGGGGTGAGATGTTAGCTTCCTGCTCCACAGGTGACACTGGCCTG
GCAGTCTTCATGTAACCCCAAGGATAAACTTTCCAGAAGGAATAG
CTGGCTCCATCCCATCTCCTGCCCTCCTAACTCCCTCCTGCACCC
ACCCTAACCCAGCAGACCCAGCTCTGAATTCCTCCCAGCCTGCTG
TCCACACGGGCTTAACGCGCTTCTCTTCTCTCCCTTTCTCCCTCT
CCTCCCGCCCTGGTTGCCCATCTCCTGTGGGACGGGGACGGCTCC
CTAG

[0398] In some embodiments, the intronic domain that promotes trans-splicing primarily in the brain comprises or consists of sequences from the gene MAPK8IP3. In some embodiments, the sequences from gene MAPK8IP3 comprise or consist of:

(SEQ ID NO: 345)
TAAGGCTGAGGCCCCGTTCCAGCGTGCGTCGCTCCTCCACCCCGA
CATGGTCTCCTGCTTCATGAGCCGTTTGCTTTGTTCTGCATGATG
GGGACAGTGTTGGGGCCGCCGGGGTCAGGGGGGCAGCCCTGAGTG
AAGCTCGCTCTGTCCAGGCTGCCTCTGGGCTGTGGGAGGTGGCGA
CTTCCCCAAGGGACAGACTTGAAGGCCCGAGGAGGGCAGCCCCAG
CCTCTCTGAACCCCACAAGCGCCGGGCAGACCCTGCCTGTGGGGA
GGAAGGCCCATGTTTGAGGCAAGGGAGGTCATAATAGAGACAGCA
GGCAGGACCCCTGAGCCCAGGCACAGAGGCGTGTGATGCTGTTTC
ATGACTGCATACACAGTGGGGGAGTGTGTGGGAGGGCAGGACCTT
GGAGTTTCTTTCCATCCTTTTGGGGTTTCTGGGGCATGCTTGCAG
GGAGATCAGTCCAGGTCCACTTGGGGCCTCGTGGTAGAGGAGCCT
TCAG

[0399] In some embodiments, the intronic domain that promotes trans-splicing primarily in the brain comprises or consists of sequences from the gene HMOX2. In some embodiments, the sequences from gene HMOX2 comprise or consist of:

(SEQ ID NO: 346)
CGGGGTTCCCGCCAGGAGCGACAAAGGACACCCCCATTGTCTATG
CATCGAGTATGTGTCGAAGGGGGCGGCTGGGCCCGGAGCGGCAAG
ACGCCTGTCCCGAGATATCGGGGTCCCGCGACCCACCTCGTGTCC
CTTGGGCCCGATCCCCTCCTCCTTCCCGCCTCCCCCGGTTCCAGT
CACCCGCCCCCCGGCCCGGGTCCCACCGGCTGGAGTGACCTCCTC
GCCGCGGCCTGGGCGGGACAAGTTCCAGGAGCCCGGGACCCCGAT
TCTGCGGCCGAGTCCACTGCAGAGGCGGGGATGGAGCTGCGCGCT
AGGCGCCAACTCCCTCCCCGCAGCTCCGGCCCCACCTGGCAGAGC
GCCGCTCACGGAAGCCCAGCGTCGGAGGACCCCTGGCTGCAGCCG
CCAATCCCGACGTGTCGGCCGAAACCCCTCCTCCGGCGCAGTTGG
CTCCTCCTGGATCCCGCGGGACTCGGCGTCGTTTCCGGGTTTGCC
CGCC

[0400] In some embodiments, the intronic domain that promotes trans-splicing primarily in the brain comprises or consists of sequences from the gene HMOX2. In some embodiments, the sequences from gene HMOX2 comprise or consist of:

(SEQ ID NO: 347)
TATTGGGCGTCAGGCAAAGATAATTAAAGCTATGTCCATGAGTCT
TATCCCTTGAGGCCTTGTCCGCTTGATATTTTCTTTGCCTAACTC
ACTTTTAAAATTTTATTATTTTTATTTTTTTGAGACAGTGTCTTG
GTCCGTCGCCCAGGCTGGTGTGCAGTGGCGCGATCTCGGCTTACT
GCAACCTCCGCCCCCCGGGTTCAAGAGATTCTCCTGCCTCAGCCT
CCCGAGTAGCTGGGATTACAAGCATGTGCCACCAAGCCCGGCTAA
TTTTTGTATTTTTTAGTAGAGACGGGGTTTCACCAGGTTGACCAG
GCAGGTCTCGAACTCCTGACTTAAAGTGATCCACCCACCTCAGCC
TCCCAAAGTGCTGGGAGTACAGGTGGGAGCCACCGTGCCCAGCCC
TAACTCACTTCTGAAGTTGCTGCTACTTGCACTGATTTCAGTTTT
TTTTTGTTTTTGTTTTTTGTTTTCAAGGTGGAGTCTTGCTCTGTG
GCCC

[0401] In some embodiments, the intronic domain that promotes trans-splicing primarily in the brain comprises or consists of sequences from the gene CDIP1. In some embodiments, the sequences from gene CDIP1 comprise or consist of:

(SEQ ID NO: 348)
GTAAAGCGGGGCCGGCGGTTGGGGCGCGGCATGGCGGGGCCCGTC
CTCCCCTCAGGGCGCTGCCGAGACCTAGCGCGGCCCTGGGGATGT
CGAAGCCGCTGCGGTGGCGGGGCCCGGGCGGGCGCCCCGCTGTGT
GCCGCGGGGTTGTGCGCCCGGAATGGCAGCCTGCTCGCCCGCACG
TTTTTCCGTCAGGGAAGGTTGTGGAAATTGCCATCTCCGTCTTGC
AGGGCGAGACGGGGAGGGGAGGGGTGGGAGTTGTTTTCTCAAGGA
AAGGGGGTCGAGGAGGAGCCCCGTGGCCGAGCCAGCCCCTGCCGA
GCCCCGCGGGTGACCTTGGCCGTCCCGGAGCCCAGCAGTGTCCTG
CACCCGCGCCCGGCTCGCCGACGTGTGGAGTCGGGATGTGGCGCT
CGGCCGCGCATCCCCGGCGGAGATGGCGACGGCCTGGCCTAGCTT
GGGGCTAGGAGTCGCGCCTTCGAGGACCTTGGCTTAGCGAGTTCC
TTGG

[0402] In some embodiments, the intronic domain that promotes trans-splicing primarily in the brain comprises or consists of sequences from the gene CDIP1. In some embodiments, the sequences from gene CDIP1 comprise or consist of:

(SEQ ID NO: 349)
TTCCCTATTCTCCAGCCTCGTGTACATTGGGCAAACAGGCCCCGA
CCATCCCACGTGCTCAGCCCCAGCTCTAGGCCAAATCGCCTCCGC
TCCCACTGACGTCATCACGGCGCATCACGTGCCTCCCGAGACCCC
ACCCCCCACCGTGACGTCCCGGGCCTCGGCCCTGGTCCAAAGTCT
ACCCGCCTCCTTGTGACAGAAGTGCGACTGCCAGCTGCCGAGGCG
TTCGGTCCTGCTGTTGCGGCCGCTGCCCCAGGGCTGCGGGGACGG
TGAGTCGACTGGACGCATTCGGAGACGGCTTCGCGCGGGAGCCCT
CCTCCCCGGGGGAAGGGTCTGGGCGCCAGCTCTCCTCAGGTCGGG
GCGTGACCTCGGACCGTGGCGCCCCCTCCCCGCCCCCGCCCGCGG
CGCCTGGGCGGTGCATGCCGGGCACCGTAGTCCCCAGCCTCTCAG
AGCGGGTTGTGGTGGGGGGGGTGACCGGGCGGACTACAAGTCCTA
GAAG

[0403] In some embodiments, the intronic domain that promotes trans-splicing primarily in the brain comprises or consists of sequences from the gene SEZ6L2. In some embodiments, the sequences from gene SEZ6L2 comprise or consist of:

(SEQ ID NO: 350)
GTAAGCACCTTGCCTGCCCCTGAAGAGCCACCACTTGGCTCTCCC
AGGACTCCATAACCTTCTCGCAAGGTCTCTGGAATCTCTGTCTTG
GGAATTTCAAACTCAGCTGCCCCCAGAGGCCATGTCAATGAGCAT
AGCAAGCCATGTGTATACAATAGGGAGTGGTGAGGACTGTGGCTA
AGTGGAGGACTTGTGCCCCATCTCAAGAATACGGCTCTACCCCAT
AGTCGAAACTGAGGCACAATTGGCAGATCTTCCAATTATTCAAGA
CAAGCCAGAAATTCAGATTTTTGTGTCATTTTACGACACCGTAGG
ATGAACCAAACACATTCACTGGCCCCCCAGCCCCTAGAGGTCAAT
GTTACTTTAAAACCCAGGATCGTTGCCCCTCCTCCCATTCGGCTG
CCTCTTCCACCCCTATCAGACTCCAACAACTGACCTGATCTCTCT
GTCTTCAGGATACGCGGGAGTATGAAGTTTCCATCTGAACCCCAA
GACT

[0404] In some embodiments, the intronic domain that promotes trans-splicing primarily in the brain comprises or consists of sequences from the gene SEZ6L2. In some embodiments, the sequences from gene SEZ6L2 comprise or consist of:

(SEQ ID NO: 351)
CTGGCTCAGACCCCATCCCCTCCCCCTCCTCTCCCTGCAGTTGCC
TATGAGGAGCTCCTGGACAACCGAAAACTGGAAGGTCAGTGAGAG
CACAGGTGGAGACCCAGGCTGGCCAGGTTGGGAGGGCAAGGCAGA
GGCTGGGGCAGGAGGCCAGGCCTTGGAGGGATGAAGCCCAGGGTT
TGAGGCCCAGGGCAGGAGGCTGGGAGAGCCCAGGACCGGGCCCAG
CCACAGCTCACCGGCCTCTCCTCCTCCTGTAGTGACCCAGACCAC
AGATCCATCACGGCAGCTGGAAGGGGGGAACCTGGCCCTGGCCAT
CCTGCTGCCTCTAGGCTTGGTCATTGTCCTCGGCAGTGGCGTTTA
CATCTACTACACCAAGTAAGTAGCCTGCTTGGGGACTGCCGGCCA
GGGCAGACGTCTTGCGAGCCTGGCACTGGAGCCTGGGTCAGGGGA
GCTCAGGGGCTTACCTGTTGATAAGCTCCTCTGTCCTCTCCCTTT
CCCA

[0405] In some embodiments, the intronic domain that promotes trans-splicing primarily in the brain comprises or consists of sequences from the gene ALDOA. In some embodiments, the sequences from gene ALDOA comprise or consist of:

(SEQ ID NO: 352)
GGAGGCTGAGGCAGGTGAATCACTTGAACACGGGAGGCGGAGGTT
GCAGTGAGCCGAGATCGCGCCACTGCACTGCAGCCTGGGCGACAG
AGCGAGACTCCGTCTCAAAAATAAATAAATAAATAAATAAATAAA
TAAATAAATAAATATAAATAAAATATAAAAAGTAGCATTGATGTT
TACAATATCCCTGAGCGGCAGGCGTTTCTCCCTTTTGCAGATGCT
CAGTGGCTTGGCCGGAGATACATCCAAGTGGTGGGTGTAGCCTGG
GGGTTCAATCCTCCTGTGGCGCCCCAGAACCCGGTGCCTCCTCCA
ACGTCCGGCATCTGATGAGGATCCGACCCAGGCGGGCGGCGGCGG
GATTCGCTCTTCCCCTTCGCTCCCCGCGAGAAAGCCCCGAGGGCC
GCGGCGGCGCAGAGCCGGTGACAGTTGAAGCTTAGGCGGGAAGAG
GGAGGCGCGAGGCGGGAAGAGGGAGTTTGGGCCTCGGCAGCCGCC
GTAC

[0406] In some embodiments, the intronic domain that promotes trans-splicing primarily in the brain comprises or consists of sequences from the gene ALDOA. In some embodiments, the sequences from gene ALDOA comprise or consist of:

(SEQ ID NO: 353)
TGATGGGTGCTGACCGACTGGGGAAGCCCGGAGTGTGGGGACTGA
GGAGGGGAGTGGCCTGGGGCGCGCTGGAGCCTGCGAGGAAGGCGC
CGCCTCGGATCCCCCGCCCCCCATTCCCCTTCCCGAATTCCACCC
TCCGGCCCAGCCATGGCCTCAGTTTCCCCAAACAGGAAAGGGAAG
GAGGGTGGGCACCCCGGTCTAACGGTGCCTCTCAGCCTCTGAGAC
CCAGAACCTTCCTTCTGCAGCTCCCGGACTGACTGGCTCTGCCCT
TCCCCATGGACGTAAGTCCGGGCCCCTTCCCCTCTCTGGGCCCCC
TCAGCGCCCTCTCCTAACCCCGAATGGGCCTGTCTTCCAGCACGG
ACTGGGGAGGGGGCTTCTACCCAACAGAGACTACAACCTGCCAGC
TCAGGACGAGAGCTGTCAGGAAGAGTCCAGGAATGGACTTCCCAC
GGGAGGGCACATTTCTGGTATTCCTGGCAAGATAAGGAGTTGACT
AAGT

[0407] In some embodiments, the intronic domain that promotes trans-splicing primarily in the brain comprises or consists of sequences from the gene GPT2. In some embodiments, the sequences from gene GPT2 comprise or consist of:

(SEQ ID NO: 354)
CGCTGGGCCCCGGGGAGGCTGGGGCCGCTGAGCAAGGGAAAAACC
GCAGCAGCCCCAGCTGGGGTCCTTCCCACGACGTCCACCCCCATG
GCCAGCTCCTCAGTCAGCCAAGCCTGGCTAAAACGAGAGAATGCC
CCCTCCCGCCCGTTCACTTACTGGTGCCCAGCACCGGGCACTCAG
TGAGGCCTTGCAATACGGTTCACTTGTTGAATTGAATTCGTCAAT
TGTTGAGCGGGCCGTGCTGCCAGGCACCGCACGTTGTGTGTCTGC
CCTACTCTCGTGGAACCAAGGTCCAGTGGAGAGAGGAACATAAGC
GAATGAAGAAAGAAGCAATAGAGTCTCAGTGATAAGTTCTTGGAA
AAAAGTAAAACGGAAGAGGGTTGGGATGGGGGCGGTGGGAGGGAA
ACCATTTTAGGTAGGAGGGGAGACGGGGTGGGGGGGGCTCTGCGG
AAAGTTGGTTCTGTTCCCCAGTCTCTTTCTCCGTGTCTTTGGCCT
TTAG

[0408] In some embodiments, the intronic domain that promotes trans-splicing primarily in the brain comprises or consists of sequences from the gene GPT2. In some embodiments, the sequences from gene GPT2 comprise or consist of:

(SEQ ID NO: 355)
TGGGGAACCAGAGAGTTGGGCCTGTCGGGCTTTGGTAAGGGGGCC
CTGGGACTTTCTTCATCTTGGTGGTCGGCCGGCTGGCTAGGATCT
TGGCTTGAGTTTATAGCTTCATGTAAGGTGAGCCCACAGCCAGGA
AGGATTTCTGCCTCCCCACAACCAGGATGTCTGGGGTGGGTGATA
GAGGGGTCCCTAGGACCTAGGAGAGAGTTATAGCCTGGGTGGAAT
TCAGGAGGCAGAGCCAGGAGGGGTTATCTTAAAAAGTAAATACTC
CTAAGATTTGTAAGAAGCTAATAATCACCTAGCTGCTTGCTAGAG
AGAGTCTGACTGAGAATAGAAGTGGGAAGGAGGGTTCCTTGATCT
TGCCCTCACCCGGGTCACTAGTGTCCCATGAATGCATGGCAGTAA
GCTTCAGGGGGATCATGACACTTGGTCCCATTCCAGTGGGGACTT
GGGGGTTTTAATGAGCTCCTGGGCCTCCTGAGACCTTGTTGAGAC
ACTC

[0409] In some embodiments, the intronic domain that promotes trans-splicing primarily in the brain comprises or consists of sequences from the gene GNAO1. In some embodiments, the sequences from gene GNAO1 comprise or consist of:

(SEQ ID NO: 356)
ACATAGCCCAGTTCTAGGGACTGCATTCCACCCTGTGTAAGAAGT
ATAGAAAATTACAGCTCAGCCAAGAACATTGATTTTTTTCTCCCC
CGAACAAAATAACCGAGTTTTCAGGATGAAAGCAGAGCTGCTGGT
TGAGTTGGAGGGTGGAGAGCAGAGCCAGGCCCACTCTGCCTTCCT
GCTGGTTGAGTTGGAGAGTGGAGAACAGAGCCGGGCCCACTCTCC
CTTCCTGCCCCAGAAAACTCTGGGGCCCCATGGGCTGCAGCTTGG
AGCTCCTGCTTTAGGACATCCATGTGGTAGAAGGCCCCACGGGCC
CCAGGAACCCCAACTGTGCATGCTCAGGTCGTGGCCCTCCCTGGA
GCAGGCTGTGGGCTGAGCTGCGGTCCTGCTGCACTGGCTGGGCTC
TCATCACAGTCCCCGCTAGGGGAGAGCCCTTGGCTGGCAGAGGTC
TTCTGTCCCCACCAAAGCGTCAAAGCCCACCATCCACCTCTCCTC
ACAG

[0410] In some embodiments, the intronic domain that promotes trans-splicing primarily in the brain comprises or consists of sequences from the gene GNAO1. In some embodiments, the sequences from gene GNAO1 comprise or consist of:

(SEQ ID NO: 357)
TGAGTGTCCCAGCGGGCGCATGGCCTGGAGCCGGGCAGTGATGCG
GGAGTGGAAGGGACTGGTGATGGGGATTGGCAGAGCAAGGAGGAT
TCTCGGCTGAGGTCACGCCTGCCGGGAGATGTTCTCCCATAGGTA
GAGGGTGTCAGGAAGGAATGAGAAGGGGCCTCTCTTCCTGCACCC
CAGGAGGAGAAAGAGGCCAGAGGAGGCAGAGGACGCAAGAGACAA
CCAAACAGTGGAAATTCCCAGAGGGCCGGGACCTTGTCACTGGCT
TGTCCTGGAGAGTGCCTGGCACTGCAAAAAGACAGCTTTCAAGTG
TAGCAGCTTTGTTTTTTTATAGGGAGCCCCTGACCGCATAAATAC
AAACCAAAACAACAGCCATATAGGCAGAAAAGAAATGGTGCCATT
TTGTTTTATTTTAGAAAAAATAATAAGCTTTCCATTCCCCATCTT
TAAAATTAAGAATAAGGAATATGTAAGTCTAATTAATATAATAAA
TGTA

[0411] In some embodiments, the intronic domain that promotes trans-splicing primarily in the brain comprises or consists of sequences from the gene MT3. In some embodiments, the sequences from gene MT3 comprise or consist of:

(SEQ ID NO: 358)
TGAGCCCCCGCCCCCGCTCGCATCCTGCGCACTGCGCGCCCTTGT
ACCTGCAAAGAAACCCACGCCCTGCGCCTTCGCTCAAGGACACTT
GGGGGAAGGGCCCCTGATTCCCTATTCTTCACCTCGTGAAGGGCG
GGCATGCCTGTGTCGCGGAGAACAGGGAGACTTGGCACCCCATCT
CCTCGTGACAGGCGTGGGGACCCGAGTTCGTCCACATTAACCCTT
CCTGTGGCGTCGCCCTCTCTAGGTGGCTCCTGCACCTGCGCGGAC
TCCTGCAAGTGCGAGGGATGCAAATGCACCTCCTGCAAGAAGAGT
GAGTGCGGGGACCCTTCCCCTCTGCCGCCGCCCCCTCTGCTCTGC
GGAGTCGGTGTCTCACCACGCAGGATGTGGAGAGACAGCCAGGCC
CCGATCCCGTGGTTTCTGACTCTTGCTGGAATAGAACCACCCGGG
CAGACATTAAAATACAGATGCCCCTGCCCCACACCCAGGAATTGA
TGGC

[0412] In some embodiments, the intronic domain that promotes trans-splicing primarily in the brain comprises or consists of sequences from the gene MT1G. In some embodiments, the sequences from gene MT1G comprise or consist of:

(SEQ ID NO: 359)
GTAAGGGACGCCCGGGTTCTGTGCCTTGGGATGCCAAATTCCCAG
ACACCATAGAGAGTGTCCCTGGGTTTGAGGAGGTCGTATTTTGCT
ATCAGAGGTAAAGGGGACTCCTTTATTGGTCCAGTGCTTTCCTGT
TGGCCAAGCTCCTGAGGGCATTTTCCTCCTCCCTGTTCCTCTATG
TCAGAGTTGAGGGTCCTGAGGCTCAAGGCTGTCCTGCTCCACGTC
ACCTGGTTGGTCACAGGGCTGCTGGCTGAGCCCCAATTCTCTAAC
CTGACTCTGAGCTACCGGATTGGATAGGAGACATTGGATAGGAGG
GGACATTGCCTCTTCCAGGTTCAGGACAGAAAGTCGAAGTCTTCC
TGGGCCATGTCTGCAGCCTGGGACTTTCCTTTGGAGTAGAAATAG
GAGGGTGCTTGGTTTTCCCAGCATGAATGGAGAGGACATGGGGCT
TCTCTTCCTCTGCTCTGAGTGGGAAAGGAGCTCTGAGGGCTGGCT
CTGC

[0413] In some embodiments, the intronic domain that promotes trans-splicing primarily in the brain comprises or consists of sequences from the gene MT1G. In some embodiments, the sequences from gene MT1G comprise or consist of:

(SEQ ID NO: 360)
GGATACTGCCAGAGATGCGAAGTTCGCACCCTTGGCCTGCCCTTT
GCACACTACTCCCTTGCTATGCTCCCCGCTTTGGCAGATCCAGAA
AGTGGAGCACAAGACTGGGGTTGCCCTCGACTCCAGGAAAGGCTT
AGCTATTGACTAGAGACCTGGGCGTTGGTGAAGGTGAGGGGAAAG
CCAGAATACTGGGGTAGGCGGAACGCCAAGGGGCGGGTGTAGCAG
GCAACCTCAGGGAAGCTGGGAAGGCCTGGCAGGGTGAGAGAAGCC
GCACACGGGGGGCACAGCGCCTCCCTCGCGAGCCGGTGCGAAAGG
GGCCGTCCTGCGGTGTGCGCCCAGCTGCGCTCAAGGGACCTTGCA
CTTGGCCCATCTCCTGCGCACAGCCCAGGCCGGGACCGCGGGCGG
TGCGGACTCAGCGGGCTGGGTGCAAGGGCGGGGCGGGGCGTCTGC
GCCCGGCCCCGTCTCCTGACTATAAAAACAGCCGCTGGCTGTTGG
GCTC

[0414] In some embodiments, the intronic domain that promotes trans-splicing primarily in the brain comprises or consists of sequences from the gene NUP93. In some embodiments, the sequences from gene NUP93 comprise or consist of:

(SEQ ID NO: 361)
TAATCTGAATAGTTATTAAACAGTATCAAAATCTTTTAACTACTA
AGAGGCCAAACATTTAAGATGGCGAATTTACTGTTCTGCTTGAAG
GACAGTACAATTGACAAGGGCACAATGATCCGAGATGCTTCTGTA
TGTTGTATCTACACATACTGTAGACTAAAATGGCAGAATCTGTCT
GCTGCTGTATAAAATCTTTTAACTACCATTTATTTTAGCATCATG
GCATGTGCAAATTCCTGCTGCTCAGTTAAGGGACCAGCTTCACAA
CTGGTGTTACAATCTGTGGCCACAGCACTGCATCACAATGCAGCA
AATGCATTTTCCACATTAACCAAACATGACAGCTGAAGCGATTAT
TAACCATGCAAGATGTCGGAAGTCATCAAAGATTCACATCAGAGT
AATTGCAGTGGTTTGGGTTGGGGAAAAAAAGTATCATAGCATTCC
TTGCCTACATGTTGTCTCTCCCCCTCTTAAATCTTAACTTGGTAC
AGTC

[0415] In some embodiments, the intronic domain that promotes trans-splicing primarily in the brain comprises or consists of sequences from the gene NUP93. In some embodiments, the sequences from gene NUP93 comprise or consist of:

(SEQ ID NO: 362)
TAGGATTGGCCGTGTTTTGTAAAGAAATTAAGACAAATGCACCCT
GGTAAATAGAGTGGCAGCATGTTGTTGCAGTGCCTCTGAAAGACA
AGGTCTTGGTTTGTTTGAAAATTTGAGATAAATTTGGAAGCAGTT
AACTCATTTGATAGAAGAAGTACTTGATTCTTCTGAGAATTGTTC
AGATTTGTATCTTGCCATTCTAATATTTTTTCTTTTAAAAATGTA
TTGGGTGGGGCAGAATTTGCTTAAATATTTAAATAGTTGGTTATT
GGGATTTTTGTGAACTTCTTCTTTAAGTAGCAAGTAGTGTGGTCT
TTAGGATTTTTAAAGGAGATACATGTGAAGTGCAAAATTCTTGTA
TGAGGTGGAATATGAAAATAGAATTTATTTTATTTACTAAAACCA
GATCCTTCTTTGGGATTGCAGGTGAGAGTGAGTGAGTGCGTGTGT
GTGTTTGTTTGTGTCTGTGGTGTGTCTGTGTGTAGGATTCTTTAG
GAAT

[0416] In some embodiments, the intronic domain that promotes trans-splicing primarily in the brain comprises or consists of sequences from the gene CNOT1. In some embodiments, the sequences from gene CNOT1 comprise or consist of:

(SEQ ID NO: 363)
GTTGGTTTTGAGCTCCTCACCTCAAGTAATCTGCCTGCTTCGGCC
TCCCAAAGTGCTGGGATTACAGGTGTGAGCCACCACGCCCTGCCA
TAGTCTCCATATTTCACAGTTTTGTGTCTGTGCACTTGTGCAGTT
GTTCCTTGGTCCCTTGCTATTCTTGGAGGATTGGTTCTAGGACCC
ACTGGGACACCAAATTTTAAGTATGCTTAAGTCCTGTATGTAAAG
TGGCATATAACCTTTGCATATCCCCTTAAATGACATCTGTAGTGC
TTATGATACCTAATGTAGTGTAATGCTATTATGGAAATAACTATT
TTAAACTATATTAATAACTTTTTAAAATTTGTGTTTTTTATTGTT
GTATTATTATTTATTTGTATTTATTTATTTATTTTTGAGACAGAG
TCTCACTCTGTCACCCAGGCTGGAGTGCAGTGGCGCAATCTCAGC
TCACTGCAACTTCCGCCTCCTGGGGTCCAGTGATTCTCCTGCCTC
AGCC

[0417] In some embodiments, the intronic domain that promotes trans-splicing primarily in the brain comprises or consists of sequences from the gene CNOT1. In some embodiments, the sequences from gene CNOT1 comprise or consist of:

(SEQ ID NO: 364)
AGTTCCTTTGTGATTACCATTATGGGTTCTGTGATGTGATCCCAC
CTAATTGTATCCAGTTAAGAAATTTGATCCTGAGTGCCTTTCCAA
GAAACATGAGGCTCCCCGACCCATTCACTCCTAATCTAAAGGTAA
GGTTCCAACTAGTTAAAGGAAAACTTATGTCTTAATATTTCAGTC
CTTTCTCTGATAAGTAGACTGTTCAGCACTTTCCTACCCAACATA
ACACGCACACTATTAGTTAAGGGTACTCTTTAAAGGAAATAATGT
TATTAAGCCTGATAGAAGGTATGATATTGTTGCTATTGCTGTTGC
TGGTGAATATTGGTTCACAGCATTTTTCTAGTTGCTAGTTTTCAT
ATTAATTTTGATATTAAATTTAGCTCTATTTACAGAACCACAGCT
TAGGTGTTGGGGCAGTCATTTGCTGGGTGTGCCCCACATGGCAAA
GAATTGCAGAACAAACAGACCTTTGTAATCTTTTTCTTTTTTTGA
GGCA

[0418] In some embodiments, the intronic domain that promotes trans-splicing primarily in the brain comprises or consists of sequences from the gene CHTF8. In some embodiments, the sequences from gene CHTF8 comprise or consist of:

(SEQ ID NO: 365)
GTACGTGCGGGAAGGGGCTCTTCCCGGGGTTGGGAGGGAGCCCAG
CCCGCTATGCTTGCGGGAGCGGAGTAGAACTGGAACCTAGGAAGT
AGCGGGAAGAGCAGAAAGGGGAGTTCGGGGTGGGGGTTAGGACCG
TGAGGTTTTGTTCCAGGTAACATTTGTAATCGTGGAGGGGGGAGG
CTTCTGGGAGAGGTAATTGGAAGGGTGGTTGGAGAGTCATTCCAG
GTTCTTTTGTGGGAGGGAAGCCGAGAGACGAGTGGGGTGGGGTCC
TGGAGGAGTGGAGTACTTGAGAACCGGGAACAATTTGGAGAACGA
GGGTGGTAGAGAAAGGACGTTTAAAGAGTAATCTTTGGGAAGAGG
GTGAACGGTTTGGAAGACCACTCCAGTGGGTGGTGTGGAGGAAGG
CGGTTTAAAGAATAGTTTCCCTGGGAGGCAGGAAAAGGGGTTAAA
ACAGCTTGTAATTTGGAGGGGGGTGGAGAAGAGGGGGGAAGCGGA
TTGA

[0419] In some embodiments, the intronic domain that promotes trans-splicing primarily in the brain comprises or consists of sequences from the gene CHTF8. In some embodiments, the sequences from gene CHTF8 comprise or consist of:

(SEQ ID NO: 366)
CCCGGTGCTCGCCTCTCTCCGCCCCGGCCCCACGTGCGCGCGCGC
TCTCAGGCTCTGCCCCGGAAGTGCTCCTGGCGCATAGTCGGAAGT
GCGCAGGCAGTGCTCGCGGCGGCGGCGACGGCGGCGGGAGGTTCG
GTTGTCGCCCGTTGGCCGCGCGGCGCCGCGCTCGGCGGCCGCCAT
TGCAGGTCAGGCCGCGGGCGGGGGGCACGGGAGGCTGCGGGGAGC
GAGGGCCGAGCCGGGATTGGGGGCGAGGGCGCGAGGGAGCGGGAA
GCTAGGGAGCCGGGGCCGGGCGGGGCGCGCGGCTCGGAGAGAAGA
ATGGCGAGCCGAGGGGCGGGGAGCGCGGGCGGGGGAGGGGTGGCC
GGGAAGGGGGAGGGCGGCGGGAGGGCGGCGCGGAGGTGGGGGCAA
GCCCGGAGGGGCCTCCGGGGTGGGAGGGCCAGGAGTGTGGGGGAA
GGGAGCGGTGTGGAGACGGAAGGCGGAGGGAAGGAAGGGAGCGAG
CGGG

[0420] In some embodiments, the intronic domain that promotes trans-splicing primarily in the brain comprises or consists of sequences from the gene CALB2. In some embodiments, the sequences from gene CALB2 comprise or consist of:

(SEQ ID NO: 367)
GACCACTGGATTTAGGGCCCACCCCAATCCAGTATGACTCATCTT
AACTAATGACATCTGCAATGACCCTGTTTCCAAATAAGGTCCCAT
TCTGGGGGAGCACTCCAACCCGCTACACCTTCTGAACTCCAGGGA
CCCCAGTTCTGCCTCTGACCAGGTCCCGCCACTTGCTGATGACCT
GTCACACCTCTGCCACCTCGTGCTTGCCCAGACATTAAGGACAGA
TTCGGAAGCTGCCAACTTCTGCTCTCCTCTGTCCTCTCGGACCCT
GTGCTAGTTCCTCCCAGTATTTTCTAGCTGCTGAATGTATGTTGT
TCATCTTGGATCTCTAGGTGCAAATGCCCTGAGGGCTGGACCCAC
ACCCCTAGCTCCACTGGCCTAGACACCTGCCTGTTGGCCAGCTGG
GAGAAGACATTCTCCACGAAGCCCCCGACATGCCCACCCCGTGCC
CCCCTTACTATTTAGTGCTGAGATTGATTTTTTCTCTCTCTTTTT
ACAG

[0421] In some embodiments, the intronic domain that promotes trans-splicing primarily in the brain comprises or consists of sequences from the gene CALB2. In some embodiments, the sequences from gene CALB2 comprise or consist of:

(SEQ ID NO: 368)
TAAGCCCAGCCCTGTCTCCGATTGTGTGGGATTTTCCTGACCTAT
GCCTTTGAGCATGCTGTGTCCCAGTTATGTATGCCATAAGCAGGC
CTCATATCGCTGGTCTTGACACAGCATTTTATTTGTAAGGATAAA
AAATAGACTGTCCCCTAAGAGTACCCTATCTCAATATCCTTGGGT
GTCTGGGATTGAGGGGTATTCATGAGTGGACACCAGGGGTTGATG
AATCCTCCTGCAAAGCTGCAAAGCTTTGTCTGCGTATGCGTATAT
TAATATATATGTAGTATTTTTTTGTCCCTAGGGACAGAGTCCATA
GCTTCCCTCAGGTGCTTAGGGGTCATGATTCCAGATTGGATGCCC
AGGAGGTTTCAAGTGCCCTGATTCTAGACCAGAGTTTCTCAGCCT
CAGCGCTGTTGGCATTTGAGGCTGAATAATTTGTTGCAGGGGCTG
CCCTGTGCGCTGTAGGAGACTAGCAGCATCCCGGGATCTACCCAT
GAGA

[0422] In some embodiments, the intronic domain that promotes trans-splicing primarily in the brain comprises or consists of sequences from the gene IST1. In some embodiments, the sequences from gene IST1 comprise or consist of:

(SEQ ID NO: 369)
GGTATGTGCCTACACGCCTGGCTAATTTTTTCTTTTTTTTGTATT
TTTTTTAGTAGAGACGAGATTTCACAATGTTGGTCAGGCTGGTCT
TGAACTCCTGACCTCAGGTGATCCACCTGCCTCAGTCTCCCCAAG
TGCTGGGATTACAGGCATGTGCCACCGCGCCTGGCATGGAACCTG
GTTTTATCTTGAAATGTTGCAAACGTTTATAAAGATACAGTATTT
CTAAATTCACATCAACATCTTATGATAAGGGCTAGCTCCTACTTG
TCATATGACTGCCCCGGTACAAGCATTAGATGCAGCCTCCACAGC
AGGGAGCAGATGACTTCCTTCTGGAGGCCCCTTTTTCTTTTTTCC
CTTTTTTTTTTTGAGACGTTTCGCTCTTGTTGCCCAGGCTGGAGG
GCAATCGCCGGATCTCGGCTCACTGTAACTCGAGAATCAAGCGAT
TCTCCTGCCTCAGCCTCCGGAGTAGCTGGGATTACAGGCTTGCGC
CACC

[0423] In some embodiments, the intronic domain that promotes trans-splicing primarily in the brain comprises or consists of sequences from the gene IST1. In some embodiments, the sequences from gene IST1 comprise or consist of:

(SEQ ID NO: 370)
TGATACACCTGCCTCGGCCTCCCAAAATGTTGAGATTACAGGCGT
GAGCCACCGCACCCGGCCCTTTTTCTTTTTTTCTGTAGCCTAGGC
TGGAGTGCTGTGACGTGATCACGGTTTACTGCAGCAGCGACCTTC
TGGGCTCAAGCGATCTTCCTGCCTCAGCCTCCCGAGTAGCTGAGA
CCACAAGTGCTCACTGCTGCTCCCCTAATTTTTAACTTTTTTTTT
TTTTTTTTTGTAGCGATGCGGTTTCACTATGGTGTCCAGGCTGGT
CTGCAACTCCCGGGCTCAAGCGATCCTCCCGCCCCGCCTCTCAAA
GTGCTGGGAAGGTCCCTTCCAGGCTTAAGCAGCGATAATGGTTTT
CAAGTTAAAAACAAAGGTAACCAAGGAAAAAGTTTTCTCTGAATA
CCGAGATAAATTAGGGAAATCGCCAGAGACTGTGGTGCTGAGGAA
ACACTACTGAATTATACCACACAGACCGGAGCGATGCTGGTCCAA
AGGG

[0424] In some embodiments, the intronic domain that promotes trans-splicing primarily in the brain comprises or consists of sequences from the gene GLG1. In some embodiments, the sequences from gene GLG1 comprise or consist of:

(SEQ ID NO: 371)
GTATGTATTAGATTATTTGCCCATCAGATATTACTGATTCAGAAAGAGA
AACTGCTCCTCCTCCACCCTGGCTCTTTCTAAAGCAGAAGTATTAATAT
ATTTAATTTTCTACAGGATATTCAAATAGAAGCCTTGCTGATGAGAGCC
TGTGAGCCCATAATTCAGAACTTCTGCCACGTAAGTGATGTCTGGAGGA
GCAAGGGTTAAAAACAGAAACAAATTGACAGGGACTCTCCCCTGAGTAT
CTCAGACTCACCTCTGTCTGCAGCATGTATTACTCTTGAGTGTTAGCCA
GCTTTGACAAGTTAAAATTAAAAATGTAAACAGGCCGGGTGTGGTGACC
AATACCTGTAATCCCAGCACTTTGAAGCCAAGGAGGAGCACTTGAGCCC
AGGATTTCAAGACCAGCCTGGGCAACATGGCAAAACTCTGTCTCTACAA
AAAATAGAAAAAATTAGCTGGGCGTGGTGGTACACACCTGTAGTTCCAG
TTACCTAGG

[0425] In some embodiments, the intronic domain that promotes trans-splicing primarily in the brain comprises or consists of sequences from the gene GLG1. In some embodiments, the sequences from gene GLG1 comprise or consist of:

(SEQ ID NO: 372)
ATTTTGTGGGGCCAGAAATCAGAGAAGTGGGGAACTACCATTTTGTCTT
AAACCTTTTAGTACTCTATTTGAATTGTCATAATGTAAAATTACGTTTC
TCAACCAGTTCTTTTTTGCTTTCTAGTTTTCAGAAGTTCATTGCCTTCT
CTCATTTCGTCGTCATCTCTCACATTATCATTGTCATCATGGACTTATG
AGAGCAGTCTGGGTGTATAGCTCTTTAAAGGAAGGTGTTTTTTCAGGAG
CTAGTGTTGCACGGGTTTCTCTCTTTAAAGGCATTATTAGTATGTGTTC
CCCAGTAACAGTGGTTTGGCATCTGCTTTGAGGGCAGTGCTCTGGCTTA
TGAGCTTATAAACTGAAGATGGATATCAGTTACCCCTGTTTTCATTTTG
AACTACTTAGCATTTTGGGAAAATCTGCAAAGGCTTTGCATACTCTAAT
GTTATTGCTACATGTGTTTTTACCTCACTTTTCTTAATTCTGCCTTCTC
ATTTGTTCA

[0426] In some embodiments, the intronic domain that promotes trans-splicing primarily in the brain comprises or consists of sequences from the gene BCAR1. In some embodiments, the sequences from gene BCAR1 comprise or consist of:

(SEQ ID NO: 373)
GTAAGAGCACCTGGGGAGGGGAGGGCTGGCCCTGGACCCACTTCCCCCA
CTAGGCCTCATCCTTTCAGGTCGCTGGGGATCTTACCTGCTGCAGGCAG
CTCCCCCGGGGCAGGCGCGGCAGGGAGGGGGCCTTGGTCCCAGCTGCTG
CGCCCCCCAGCACACACCCAACCTGCCCCTCTGGCCCTGTCCTCCAGAG
TCTCCCCATGCTGTGCTGTGGGGCAGGGGGTGCTAGGCTCTATCTGGTC
CTGGGCCGGATGCAGTCCCCTGCTGGGCCAACCCTTCTGAGGAGGCTAC
AGCTAGGTGGTGTGGGCAGCAGACTCCCAGGCCTCCGACGTGGCCTCTT
GTCCTGTGGGGCTAGGCGCCCCAGTAACGGGGGGTTCCTTGCCTGTGGG
TAGTGCCCTCCAGAGCCAGGGCCTCAGCCCCTCACCCCACCGGTGTCAT
CAGCTCATACCCATGCTCCTCTGTGGAGCCTTCTGGGTCAGCAGGCTGT
AGAGACGTT

[0427] In some embodiments, the intronic domain that promotes trans-splicing primarily in the brain comprises or consists of sequences from the gene BCAR1. In some embodiments, the sequences from gene BCAR1 comprise or consist of:

(SEQ ID NO: 374)
CATTTTGCAGAAGGGGGAGACCAGCCACTGAGCTCCAGGGCGGGGGCCC
ACTTTGTCCCCTTCCTCCGACCTGACACCTGCCTCTGGGGCCCTTACCG
GGAGGCTGGGATGTATTCCTGAGTTCGCTTGTCCCCCCGCTTGATGCCT
GATAGTAGGGGAGGAGAGGGGCGGCACCCTGGCCCTGGGGCTGCCTGGG
TTCTGTGCGTGCACCTGGCAGTGGGCCTGTGCTGTGTTTTCTCTGCATT
GTATGAGGCATGTGTGTCAGAGACCGTGTGGGTCTTATGTCAGTGACTG
TGCCTCTGTTCTCTCCTCCTGGGCTCTGGCTGTGTTCCCCTAACCCCCG
GGGGACCTCCACGGCCTGCTAGTGGGGTCTCAGGTGTGCAGCAGGGTGG
CCTGTGATTAGCAGTGGGGCTGAGTCATTCCCCTAAAGAGCTTTTCCCC
CTGGTGGCTGCGTTGCTCTGTTTTTCTAACAGAAACATTTGGTCACTGT
GGCTGCCTA

[0428] In some embodiments, the intronic domain that promotes trans-splicing primarily in the brain comprises or consists of sequences from the gene ABR. In some embodiments, the sequences from gene ABR comprise or consist of:

(SEQ ID NO: 375)
GTAGGTACACCGGCTTTTCTTTCTGGGTTTGGGGAGGGGTGACGGGAAG
GCCTGGGCATCGTGGGCCAGGCCCTGCTTGGGTTGGTCTCGAGAGATTG
GGACTGGAGACGTTTGGACCTGGCCGTTCTTGGTGCCTCGTCATCTCGT
CCTGGCCCTGGACCCCTCTCAGGCTCGGGCTTCCCTCCCCACCTGCTTT
GCCAACGCTGCCGCCCCTGTCTCTCCCCGTCTACTAGCCGTCTGCTCCC
CAGGCCTCCCAGACCCCTCCGTGCCTCTTTCAGCTTTCCCCTGTTAGCC
TGTCTCCTCCAGAGGACCCAGGAGAGGACCAGGCTCTCCTCCCCTCTGC
ACCCAGGCCAGGCAGTGGCTGCATGCGTGGCCCGTGGGCTCCAGGTGTT
CAGATGCTGCTCCCGCAAAGCCAGCCTGGGCCTGGTGCTCCCTGTGGGT
GCAATGAGCTGCCCGCTCCAGCCCTCCTCTGTTCACTCTGGAAGGGAAC
AAACTCTGA

[0429] In some embodiments, the intronic domain that promotes trans-splicing primarily in the brain comprises or consists of sequences from the gene ABR. In some embodiments, the sequences from gene ABR comprise or consist of:

(SEQ ID NO: 376)
CTCCAGAACCTGCCCTGGACCCCTGGAGGGAGTGGGCTCAGTACAAATG
GTACCCAAGGAGGAGGGCCACAGGAAGTGACATCGACCGGCCCCCCCCA
CCTCCTTATTCCCTATAAAAAGCAAAATGGTGACTCAGAGAGGAGAGTT
GGAAGCGTCCTGCCTCTTGCTCCCACTGTTAATTTTTACACTTGGAATT
AGGCAGAAGGCAAAGAAAACAGCAGCTTGAAATACGCGGCTGACATGCT
CTTCATCGGGTAGCAACAGCAGAGCCGCTCCTCCCCGCCTCCCAGCAGC
CCCGGAGCGGGCAGGGCCCGGTGCCTGCTGGCTCTCCCCCGCCCCTCAC
CAGGCCCAGGCCCCCGCACAGCCCCCGCCCGGGCCAGGCGTGGATGGTG
CGGCCGGGGCCATGGCTGCCGGGGGCCGCCGCCGGCGCCCACTACGCTA
CCAGTCCCTGGCAGCTCTGGTGGAGGATTCTCAGTGGCCTTTCTTGTTC
CTTGTCTCA

[0430] In some embodiments, the intronic domain that promotes trans-splicing primarily in the brain comprises or consists of sequences from the gene UBB. In some embodiments, the sequences from gene UBB comprise or consist of:

(SEQ ID NO: 377)
CATTGCACTCCAGCCTGGGAAACAAGAGCGAAACTCCGTCTCAAGAAAA
AAAAGGAAAGACCCCCCCTCCTTCTCCCGCCGGAAATACCCTCTTTCAG
GACGGCGCGCCTGTGCGGCGCACGCGCGCTCAGTTACTTAGCAACCTCG
GCGCTAAGCCACCCCAGGTGGAGCCCAGCAACAACAGAGCCACCGCGTC
CCCCACCAATCAGCGCCGACCTCGCCTTCGCAGGCCTAACCAATCAGTG
CCGGCGCTGCAAGGAAGTTTCCAGAGCTTTCGAGGAAGGTTTCTTCAAC
TCAAATTCATCCGCCTGATAATTTTCTTATATTTTCCTAAAGAAGGAAG
AGAAGCGCATAGAGGAGAAGGGAAATAATTTTTTAGGAGCCTTTCTTAC
GGCTATGAGGAATTTGGGGCTCAGTTGAAAAGCCTAAACTGCCTCTCGG
GAGGTTGGGCGCGGCGAACTACTTTCAGCGGCGCACGGAGACGGCGTCT
ACGTGAGGG

[0431] In some embodiments, the intronic domain that promotes trans-splicing primarily in the brain comprises or consists of sequences from the gene UBB. In some embodiments, the sequences from gene UBB comprise or consist of:

(SEQ ID NO: 378)
GGCGGTTGGCTTTGTTGGGTGAGCTTGTTTGTGTCCCTGTGGGTGGACG
TGGTTGGTGATTGGCAGGATCCTGGTATCCGCTAACAGGTACTGGCCCG
CAGCCGTAACGACCTTGGGGGGGTGTGAGAGGGGGGAATGGGTGAGGTC
AAGGTGGAGGCTTCTTGGGGTTGGGTGGGCCGCTGAGGGGAGGGCGTGG
GGGAGGGGAGGGCGAGGTGACGCGGCGCTGGGCCTTTCCGGGACAGTGG
GCCTTGTTGACCTGAGGGGGGCGAGGGCGGTTGGCGCGCGCGCGCGTTG
ACGGAAACTAACGGACGCCTAACCGATCGGCGATTCTGTCGAGTTTACT
TCGCGGGGAAGGCGGAAAAGAGGTAGTTTGTGTGGTTTCTGGAAGCCTT
TACTTTGGAATCCCAGTGTGAGAAAGGTGCCCCTTCTTGTGTTTCAATG
GGATTTTTATTTCGCGAGTCTTGTGGGTTTGGTTTTGTTTTCAGTTTGC
CTAACACCG

[0432] In some embodiments, the intronic domain that promotes trans-splicing primarily in the brain comprises or consists of sequences from the gene LRRC75A-AS1. In some embodiments, the sequences from gene LRRC75A-AS1 comprise or consist of:

(SEQ ID NO: 379)
CTGGCGTAGCGATACAGAACGTCGTCTAGCGAGGTCGACTCCATGCCCA
GGTCCTGCAAGAGCAAAGGATGCCCAGAGGTCAGGGCTGGCTGCCCACC
CAGCTCGCCCACCATCCCCAAGAGAAGTAGGCACAGACCCCTAGAGGCG
ACTCTGCCTCCCAGAGCCCCGGTGGGGAGCATCTGCAGAACTTCCCTCA
GGGGCTGGGGCAGGCCTCTCCTGTTTGTCTTTGCCTCCAAGTTGAGGAA
GAGCAGGGACTGGCCTCTGCAGGCTCTGCAGTTTGTGCAGGTCCTGGCT
TGTGGCCCTCTCCTAGGACAGCCCCTGACCTTTGTCTCTCTGGTTTTCC
AGAGGAGGAAGCCAAGGGTGGCCTGCCTCGGTGCAAGCAGCTGCTTCTC
TATGGTGGCAAAATTTGGAATTAACTGCCTTGTGACAGGATGGTTTAAT
GATATTTATTTGTGTTTTCTTCCTGCTTCTGACGTTGTTTTTACTGCTC
CTTCTGTAG

[0433] In some embodiments, the intronic domain that promotes trans-splicing primarily in the brain comprises or consists of sequences from the gene LRRC75A-AS1. In some embodiments, the sequences from gene LRRC75A-AS1 comprise or consist of:

(SEQ ID NO: 380)
TACTGAGTGGAATCTTCCCGATGGGAGGGGAGCAGCTTGGAGGCGAGTG
CTACTAAGTGTGGTGGGGCCGCGGCAGAAACCGCTGGAGCAGAGCTTCC
CTGGGTCTGAGGAAGGAATTGGGTTTGGGGGCTCAGGACACACCACCCC
AGAATATGGTACCCTGGCATCTGAGGAGGCAGCTGACACAGGAAGGTCT
CTCTGACTGCTGTTCTCCCCCAAAGCAGGCCCTGAAGAATCCTGTGACC
TTCATCTAAAGTAGGTCATGAGACCCCTGAGCTTAAAACGGAGTGATCG
GCTTTGGAGAAGTAAGGAGACATGACGTGCCTGCCCTGGGGTGGGGACT
AAACTTCGTGCCACTCCACGTGAAAGGGGGAGGTACGCCTGCTCCCTTT
CCTCAAGCCCCCCCCTCCCAATTTCTGCCATCCTTGGGTATGAGCTACA
CGACAGTCCCTGACCCTAGCTTGGTGCCCTGCACAGACCAGGCAATGCT
GACATTCCC

[0434] In some embodiments, the intronic domain that promotes trans-splicing primarily in the brain comprises or consists of sequences from the gene ALDOC. In some embodiments, the sequences from gene ALDOC comprise or consist of:

(SEQ ID NO: 381)
GTAAGGCCAGGCAAGGCGGGAGCCACTCAACATCTCCGCTTCATTTCCT
TGGCTCTTCCCCTGCCATCCTCGTCCTGCTACCTGGGACTCCGGGATGT
GCCCTTTCGACCCTTTCCTAACATCTTTGCTCCTTTCCGCGTACTTGAA
ACCCCATGGCTCAACCTCTTCTGTTCTATCCCTCTTCAGCTCTCCCAGC
TGGACCTCAGCTTTTCCAATCCCAAATCCTCCTCTACTTGTTGGATTTT
TCCTTGGAGTCTGTCTCTCCTACCCAGAGCATTTCCTTCTCAGCCTGCT
CCCTCTCCTCCTAGGCTAGGTCCTCTCTCCAGTTCTCCCGCCTTCTCTG
CCCCCCGGTCTAGGTCTCTCCCGCTGACTGGTTAGCCTGCATCACCACT
AGCTCCCCTCAGTCTCATCTCTCTCTCAGGCTCTCTACTCCTTTCAGCC
TTGGTCCTCTGCCCTCCCGTCTGGGTGTCTGAGTTGTGGGGAATTGAAG
TGCTTCCTA

[0435] In some embodiments, the intronic domain that promotes trans-splicing primarily in the brain comprises or consists of sequences from the gene ALDOC. In some embodiments, the sequences from gene ALDOC comprise or consist of:

(SEQ ID NO: 382)
CCTGCCCTTCCTCCCTTCCTCTGCTTTCACCAAAACTCTGGGCACTGGA
CTGCTTGTTCCCTGGCTCACCGCCTGGAGGAAACAGAAAGGCTTCATTC
TCTTACTTTCCCCAGCCCCCTCGGGGGTATACCCTGGCAAATATGGGGG
TGAGGACAGAGAAGCTCAGTTCATTACTTCCTGCCCTGAACTTGGGCAC
CTTGAAGATGCTTCTGCCCCACCTACTCAACCTGTTGTTACTGTTCTGG
TGCCTCCTCTTCACCAGACTAAGCTTAATCCCCAGCATCCAGCAAGTGC
CCGGCACGTGGTAAAGGGATTGTGGCAGAAATGAACGCAAGGTCATGGC
CAGGCTCCCCGAGGTGGGAGGGCAGTCCCTAACAGCCACGGATGCCTGG
CGGGGCGCTCACTCCACCTCGCCGCCCCGCCTCTGAGGGCGTGGTCTTG
CCCCGGACACCAGTCCTGGGGAGGGGGTGTGGTCAGGGCGGGGCATGCA
GGCCACGCC

[0436] In some embodiments, the intronic domain that promotes trans-splicing primarily in the brain comprises or consists of sequences from the gene GIT1. In some embodiments, the sequences from gene GIT1 comprise or consist of:

(SEQ ID NO: 383)
GTATATGGTGCCTGCCGGGGCAGCAGGCCTGAAGGTGGGGTAGGGCGGG
GAGGCATTTGGTGTGCAGCATCTGGGGTGCCATCTCCCCGGGATCCCTG
CATGTTGGGGAGGTTGCTGGCATGGGCCTGGCCACCTCTCAGGTCTCTC
CTCTCCTCCCAATTCCCATCTCCCTCTGCCCTCAGCCTTGACTTATCCG
AATTGGCCAAAGCTGCTAAGAAGAAGCTGCAGGCGGTAAGTCTGCTCCA
ACAGTGCCCTGACACTTGAAGCTGGCCCCTCTCTGATCCCCCACCCTCT
GCTCTTGCTTCCTCTGCCTCTGACTCGATGACCTTTTCCAAGTCTTTGA
CCTGTCCCCTCACTGGCCTCAGCAGTCCCCTCTCCCTGACCTCCCTACA
AGGGGATGGACTGGTCCCTTCTCTCCCACCTTGGAGTTTGGAACATGAT
CCCTTTCCACTTTCCCATTCTGAGACTGTAGGGGCTGGGCAGCACAAGG
AAGGCCACC

[0437] In some embodiments, the intronic domain that promotes trans-splicing primarily in the brain comprises or consists of sequences from the gene GIT1. In some embodiments, the sequences from gene GIT1 comprise or consist of:

(SEQ ID NO: 384)
CAGGTGTGAGCCACTGTGCCCGTCCCTAGGGTATTCTGATGAAGTATGT
TTGGAGTGTGCCATATGCACCTGTTATCACTGCAGTGCCTTAAGGCAAG
GGGTAGTGCAGCCAGGTGTATCCAAAAAATCACCCTGGCTGCTGGGTGG
AACAGGATTGTAGGGACAAAACTAGAAGGAGGGAGATTAAGAAACTTAC
AAAGCCCAGGCAACAGGTGATTGAGGAACCTGGGGAGCTTCACTAGGAC
TGGAGGGTGAGGGAGGCTTCAGGTGACTGCCAGGTGGCTGACACTGGTG
GTGGACAAACAGGTCACTGAGAGGAAGAGCAAGCCAGAGGAGGAGGGGT
GGGGGACGCGGTGAGATGAATTCAGCTTTGTCCCTTCTGGGCCGGGTGT
GCGTGGAGATGGGTCTGGGCCTGATGTGAAAAGGCGTGTGCTGCCCTGC
TCCTGGGTAACTGCCGCCTCTGTCCTGTTCTTCCCTCTGCTGCCTTCCT
CTGGACTTA

[0438] In some embodiments, the intronic domain that promotes trans-splicing primarily in the brain comprises or consists of sequences from the gene ATP6V0A1. In some embodiments, the sequences from gene ATP6V0A1 comprise or consist of:

(SEQ ID NO: 385)
TCTTGCTGCAGATATTTTGTTTGAGCTTTTTTGGTGTCATTTGCCTACT
TTTTACAGGGAGAGAGAGAATTAGGCCAAACTAGACTTTTCCTTAAGAT
ACCACCTCCAAGCCCACTCTCCTTGCCTGACCCCTTGTAGCACAAAGCC
TCTGAACTGAACTATTAAATCTCATCTACTCATTATGTTCTTTTTAAAG
CAAATAAAATAGGAGTTGAGGACTCAAGTTGGACTTTTCAGTCTGTCTG
ACCACTTTCACTATATATGATTTTTTAAAAAAGAAATCACAAGGGTTGT
GGATGCCTTTAAAAAATATGTATCTTAATGCTCTAAATTCCTGCTGATT
TCGCTTTGTGTATATGCTGAGGAGGCCTGCCTCCAACGTGCTAGCCCAT
TTAACATGAACAGTCCTCCCCAAGAAGCATTCAGTAGCCTTGTGCTCCT
AACTTGTGACCTTGTGTGTGGCGTGGCTCCCCACTAAGTGTAAATTTGT
GTTTTCAAG

[0439] In some embodiments, the intronic domain that promotes trans-splicing primarily in the brain comprises or consists of sequences from the gene ATP6V0A1. In some embodiments, the sequences from gene ATP6V0A1 comprise or consist of:

(SEQ ID NO: 386)
TAAGATGAAAGCTGGCGTTGCCTTCGTGTTTATCCGGGCTTCTCTCTTCC
CATCCTTGTGATCACTCTGCTGACCCTGCCACACCCTGGGGCCATACACA
TGACTCCTGTGCCTCTGCATCTCACTGGCCATTTCAAACCAGTTCGTGAG
CCTGTGTTCTAAAAAGCTCATCTCCATTAACTGCATCTCATGTCGGTCAC
CTCTGTCTTTGTTTCATTGACTTTGCTGATTTAACACCTCTGAGAATGGC
TTTGAAAGGAGCTACAAGTAATGTCTTCACTGGCATTCTTGAAGTGACTC
CTCTTGGGGGTTAAGTCCCATTGGCCTCTGCCTTCCTCTCCTGTGATGTT
GTGGTTGATCTACTCCCAGCCACCGGGAGTAGCCGTTTCCTCCCTGCTCC
TCCTAGTGCTTGTGAGCAAACCTTACCCTTCCTCCCTGTCTGAGCCAGCC
TCTTCCTGCTGCCCTCCTCAGCTTGATGATGCTTCAACTTAGAAGTGGT

[0440] In some embodiments, the intronic domain that promotes trans-splicing primarily in the brain comprises or consists of sequences from the gene PSME3. In some embodiments, the sequences from gene PSME3 comprise or consist of:

(SEQ ID NO: 387)
CCTACCCGACACTTGACCCCGGCAGTGTGAACCCCGCTGGGAGCGTCCAA
AGCCATGCCTCATCGCGGCTGCGCAGCGCACGTGCACAGCCTCGCAGGAG
TCTCGGCGATTGGCTGTGACGCAGTTTCCGGCGTGAGCGGCGAAAGCCGG
GAGGGCGAGCGAGAGAGCAAGCAGGCAGCAGGCTGCCGGCGGGCGGGCGG
ACGGCACAGAGGGAGGGAGCGAGCGAGCAGTGAGTAAGCCAGCAAGGGCG
GTCGGGTCCCGAGGTCAGCCGAGATTTCTCAGGTCCCTCCGGCCCCCTCC
CTGGAGTCCACAGCGCCTCCGGTGTCCAGAGGATCGGACACGGCCCGGCC
CGGCCATGGCCTCGTTGCTGAAGGTGGATCAGGAAGTGAAGCTCAAGGTA
GCGGCACCGGTCCGGCCTTTTTGCCCCTCGCTTTGATCCCCCAGCAGTCT
GACCGGCTTCCTACTCCCCATGGCGTCTTTGTCTCCCTGGGGATACCAG

[0441] In some embodiments, the intronic domain that promotes trans-splicing primarily in the brain comprises or consists of sequences from the gene PSME3. In some embodiments, the sequences from gene PSME3 comprise or consist of:

(SEQ ID NO: 388)
TAATCCCCCAGCCCAACAACGTCCCTGGACACTGCCCCTGCCCTTGGCGG
CTGGCCTGCCTAGTATCATAGACTAGGTCTGGGTGGGGGTTGGCACGTTT
GTGAGCTCACATCTTCCCTAACTACCTGTCTTTTGTCTGCTTATCAAATT
CAGACAGCTTCAGACACAGGAGGAAGGGAGGGAAGGGGGAGGACAGAGGA
GACAGGCAGGTGCTGTCCTCAAAGCCCTGCGTTCTTCTGAGATGGAAAAA
TGGATCCTCAAAAAAATAAAGTATTTGCAGTCTGGGGGCCTCTCAGCTTC
TTATTACAGTTACAAGGTGAGGGAAAGACAGTTGGATTGGGATTCTCCAT
CCTGCTCTTACCTCTGTCCCCAGGTACTGAATTGCTCTCTTTGTTAATTT
TAGGTTGATTCTTTCAGGGAGCGGATCACAAGTGAGGTGAGTGAAATAAA
TAGAAAAATGGTTGTTGGTTGAGAATTTCCCAAAGAGGAGATACCTGGA

[0442] In some embodiments, the intronic domain that promotes trans-splicing primarily in the brain comprises or consists of sequences from the gene GFAP. In some embodiments, the sequences from gene GFAP comprise or consist of:

(SEQ ID NO: 389)
GTAGCCCTGCCTGTGGGCCAGCCTGCCTCCTCCAGGCAGCCCTTCTTGCT
CTGTACAAGAGAATGGGGGAAGGAGGGTGGAGGAAGCTGGGAGAATATCC
TCTCCAGGTGACTGACTTTCACCAGAGAAGTGAGATGGCTTGCCCAGGGT
CACACAGGCACTATTGCTTTCAAAAGTACCCATTATTATTACTGCTACTA
TTGCTATTATTAGTAGTAGCTGATACTGTTCTGTTCTAAGCCCTGTGCTT
TTCATGGATTACCTTACTATGAAGTAGGTGCTGTTCTTTGACAGATGAGA
GAGCCGAAGTCCAGAGAGGTTAACTAATTTGCTCAAAGTCACACAGCTCC
TAAGTGGTAGAGTTGGATTTCCAACTCTAGCACATCTCACTTGGGAGCCT
GCATTCCATGCCTCTGCCAGTCTGTTTTGGGTTACTGAGCCTCTACCATA
TGCCAGGCACCCCCCAGGACACAGAGAGGTGTCTGACCTGGAAGGTGTG

[0443] In some embodiments, the intronic domain that promotes trans-splicing primarily in the brain comprises or consists of sequences from the gene GFAP. In some embodiments, the sequences from gene GFAP comprise or consist of:

(SEQ ID NO: 390)
CTGCTCCCCACTGCCCCAGAAGGAGGGGTAAGGCAAGGCTGAGGAATGGG
GAGAAGGAGCCTGGGGCCCCAGTGGCCCTCTACTCCTCACCCCTCCTGCC
ACTCCAGGAAGCAGATGAAGCCACCCTGGCCCGTCTGGATCTGGAGAGGA
AGATTGAGTCGCTGGAGGAGGAGATCCGGTTCTTGAGGAAGATCCACGAG
GAGGTGAGGCCAGGGCAGAGGGAGGAAAGCTCAACACAGAGATTGCAACT
GAGAGAGGGAGAGACAGAGACAGAGAAGCTGAGACTGAGAGAGACACTCA
GAGAGAGGAGAGAAACAGAGATTGGCAGGTAGAGACAGGAAATGAAAGAC
AAACAGAAAGACACTAAGGGAGACGGAAAGAGACAAGAGAGCATTCGAAC
TCCTGGCCGAGGGGCAGGCAGAAGAGGACACAATGGCGTGGGGAACCCCA
GCTGTGGCCTGTACCCTGAGCCCTGGTACCGCTTCTCTCACCCTGGTCA

[0444] In some embodiments, the intronic domain that promotes trans-splicing primarily in the brain comprises or consists of sequences from the gene CDK5RAP3. In some embodiments, the sequences from gene CDK5RAP3 comprise or consist of:

(SEQ ID NO: 391)
TCCTCATATCTTGTGTCCCAGCTCAGGCTATAATCCCTCGATAACAACCT
CCTTCCAGCCTCCTTGTCCCCAGTCTTATCTCCCATGCATCCATCATCCC
AGCAGCCTATCTGTACAGGTTCCTCCCTGCCTCAAACCCCTTCTGTGATT
CCTCTGTCTGAAGGGATGAAGTCCAAGTTCCTTAATAAGTCTCCCTTTGA
TATGGCCTTTCCACCCTTACAGCCTCTCCTCTAGCCACTCGCTGCCTCAA
ACCATCTACGGTATAGAGGTTGGCCTGCCCGCGGAGCCGACTTCATCTTG
AAATTCTTCATCATTTTGTAACAAGCAGCTGTGCATTTCCATTTTGCACT
GGACCTCACAAATTACGTTGCCCGTCCTGCCTGCCTGTTGTTGCTTGCAC
CCCTCTTGCAGTTTGTGGCCACCTAAGCTTTGTCTGTGTAGTCTCCTCCA
CCTAAAACTCCTCTTCCCACATCACCCAGCTATCTTCAGCTCTTCGTTT

[0445] In some embodiments, the intronic domain that promotes trans-splicing primarily in the brain comprises or consists of sequences from the gene CDK5RAP3. In some embodiments, the sequences from gene CDK5RAP3 comprise or consist of:

(SEQ ID NO: 392)
TATTTGCAACGGCCTCCCAGATCGGCGCTAGGACCCCGCCAGCAGACGTC
TCAATCTGCGTGGAGAAGACCCAGTGCCCGCCAGGGGAAGCGGCTGCCAG
GCTGGGCTCTCGAGCGCCGCCTGTCGCAATCCCACGGCCGCTGCAGCGCA
CCCCCTCCCGTCCCCTGCCCTGAGCCCGCCTCGCGTCTCCAATTGGCTGT
CTCCATTCTCCCGCCCCTCCCGAGCTCAGCCATTCGGAGCCTGGGGTGGG
CGGGGCTTGAGGCCTGAGTGGAGCGTAAACCCTGATTGGCTGTACGGAAG
GCGGCGACGTGGCCGAAGGATGCCCGTTTGTGTCTAAACGGAGGCTCGGC
CACAACGCCACTGGATTGGTGGTAGGGCGGGGCGGGCCACAGTCTCCAGC
CTGAAGCGGAAGTGGAGGAAAGATGGAGGTGTGGGGACAGGAGCTGGGTG
TGCTGGGGACTGGCCGCGGACCCCTAACCTGTGTCTCCGGTCTCCCTCC

[0446] In some embodiments, the intronic domain that promotes trans-splicing primarily in the brain comprises or consists of sequences from the gene CBX1. In some embodiments, the sequences from gene CBX1 comprise or consist of:

(SEQ ID NO: 393)
GTGTGCTGATTGGAGGAGGAGATGTGTGGAATAAATTGGGAAAGGGGACA
CGGAGGGGGAGGGGCAGGCGTTTGCTGGGCCTGACTCTGGAAGGGGAGGA
GCTGTTAGGATAAGTAGGGCGGAGATCCCGAGAATATTTCTATAAGGTAT
GTAAGAAAAAAGGGGAAAGCAGGCCGCCCTTGCATCCTGATGGGTCCTTA
CAGTGGGGAGGCTGTAAGAATAATGTGCGAAGAAAGGATGGAATACGCTT
TTTTCAGTTTTCCAGGTTTCCTACTACCTTCACTCCATGATTCCTTTGGG
GAGTTAAAAAAGTCCAAGTGCAGTTCTTGCTTTGATTCAAAATTAGTTCC
GTACGTTTTTGTGTGGGATCGTAACTGGTCTCACAAAGGTGATGAAATTG
TAAAAATATGTAGATGAGTTAATAGTTGAGGAACGGCGTGAGGTAGTGAG
AGATTGTGAGATCGTGTGAGGTGCGAGAAATTGGGAGACATAGGAAAAT

[0447] In some embodiments, the intronic domain that promotes trans-splicing primarily in the brain comprises or consists of sequences from the gene CBX1. In some embodiments, the sequences from gene CBX1 comprise or consist of:

(SEQ ID NO: 394)
GATGACAGGCGTGAGCGACTGCCCCTGGCCCATATGTTCTAATATTCTAG
GTTACAACGCTCTACGCTGCAATCTCTCCACCGTTACAGTTTAAAAACTA
TAAGTCCCTACCACCCTCGCCTACTGTGCGTGCGCGGCGCGCGGCGCTTC
GGGCCTTGTAGTCTTGGACAGACCCCCGAGGCCCATGGTGCCGTGCGGCG
GGTCGTTGCGCCTGCGCGGTGCGAGCGGCGGGCAGCGCAGACTGCGAGGC
TCTTTTGTTCGGCTGAGGGGAGGGCCGTTGGCCGGGGCCTGCGGTACGCC
GCTTCAGTGAGGGACGCCACTGCGGCCACCCGGCTTGCTGCCTTCCTGGG
CGCCACTCCCCCAGGCGACCCGACGCGACGCGCCAGCAGCGCAGCACCGA
TTCCTCTCGGGCTCTTGGGCGCTGCTCTGAGGTGAGGAGCCCGCTGGAGG
CGGGAGAGCTGGGGGAGGGGGCGCGGCGGCGGCGGCGGCGGGAGCCCTG

[0448] In some embodiments, the intronic domain that promotes trans-splicing primarily in the brain comprises or consists of sequences from the gene PHB. In some embodiments, the sequences from gene PHB comprise or consist of:

(SEQ ID NO: 395)
GTGAGTCCGACTTGTGAGGGAGGGGAGAAGGGGCTGAGCCCGGGACGAGC
CAGGGGTTGCTCAGAGTAAGGGAGGTGTCCATGGAGGCAGGGTGAGGAAT
AATCCAGAAGCTATTACAAATGTAAAGGGCCGGGTGTCCCAGCCTCAGAG
AAGGAAGATTTAAATGCACTGGACGAGATCAGGGTAGTCTCAGGAGTTGA
GGTCTGGGAAGTAGGGAGGGAGGATTTGAGACTGGAGCGGGCAACGACGG
TGGGGCGGAGCGTTAGAAAGTTACATGCTGGCGTGATTTCTAGTTAGGTC
AACTGTGCTTATGCCCACCCCGCCTCAGCCCCACCCTCCCAGTTATTCCA
GAGCTCACTGTCCCTGTGCAGCTAGTTAGAGCCTTTCTCCCAAATGGGTT
CTTCAGTTATCTTGGCCCCAGGATGTCATCCAGCTCCTGCTTCCATAAGA
AGCATGTCGTTCTTAATACACGATGTTGACAAGCAGTATGGTGAGGAGG

[0449] In some embodiments, the intronic domain that promotes trans-splicing primarily in the brain comprises or consists of sequences from the gene PHB. In some embodiments, the sequences from gene PHB comprise or consist of:

(SEQ ID NO: 396)
AAGACGGCCCTTCGTTTCCCCCAAAGGGTCTCAGCCTGCCGGTGATTTCA
CCACGACTTCCTCCAGAGTTCCACCTGTCCTCTTCATCAGCCATGAACTT
GCCCCTACTAATTTTTGCCACCAGCTGGACGCCCACCTCCTCTTTCCCGG
AGCCCTAAGGCTCTCCTTGCGGCAGTCTTAGCCTCTGTACAGGATAGGCA
CGTGCATTTAGCCCCAGAAAACTACAGCCCCCAAAAGGCTTTGCGGCAAC
ATCCTCGCGTTGATCACCAAAGAGAAAACGCTTTTCTCCGCGGGCCCGCC
GCTGCATAGCCTTTTGGGAGTTGTAGTTCATCTGCTAAGAGCCGCAGAAC
CAGGGTGAGGTTCTAAGCCACCCTTCCCAGAACTCACAGCGCTCTTCCAC
ACCAATAGGAAGCGTGGATCTTGGAAAGCGGGCGGGGCAGAGGAGCTCAT
GCGCAGTATGTGTGGTTGGGGAATTCATGTGGAGGTCAGAGTGGAAGCA

[0450] In some embodiments, the intronic domain that promotes trans-splicing primarily in the brain comprises or consists of sequences from the gene CLTC. In some embodiments, the sequences from gene CLTC comprise or consist of:

(SEQ ID NO: 397)
ATTACCTCAAATCCCTTGAACCATGCATGCTACCTTGCAGATGTTGCTCT
TTCCTTTAACTTCATCTGTATTTGTTCTGCCTCTTATTTGAAACAGTTGA
ATGGCATGTTTGTTTGAAGAAGAGAAGGTCCAATACTTGGCTATTAATAG
TCTCTCTTTAATTAACATAATGTAGATGTTATTGTGACCTTGAAGCATTA
ATGTTAAGTGAGGATTTGTGTTGATGAGCATATATGAATGTCAAGTCTTT
GGAATCCACTTGGTAACATGGTTTCTTATTATTTTTTCTAGCTCCAGAAC
CTGGGTATCAACCCAGCAAACATTGGCTTCAGTACCCTGACTATGGAGTC
TGACAAATTCATCTGCATTAGAGAAAAAGTAGGAGAGCAGGCCCAGGTGG
TAATCATTGATATGAATGACCCAAGTAATCCAATTCGAAGACCAATTTCA
GCAGACAGCGCCATCATGAATCCAGCTAGCAAAGTAATTGCACTGAAAG

[0451] In some embodiments, the intronic domain that promotes trans-splicing primarily in the brain comprises or consists of sequences from the gene CLTC. In some embodiments, the sequences from gene CLTC comprise or consist of:

(SEQ ID NO: 398)
TGGGTTTTCCTTAAAACTCTTCCTATGTTTTTGTTTTTTTTTGTTTTTTT
TTTGTTTGTTTGTTTGTTTTTGAGACGGAGTTTTACTCTTGTCACCCAGG
CTGGAGTGCAATGGCACGATCTTGGCTCACTGCAATCTCCACCCCCCAGG
TTCAAGCGATTCTCTTGCCTCAGCCTCCCGAGTTGCTGGAATTACAGGTG
CCTGCCACCACAACCAGCTAGTTTTTTTGTATTTTTAGTAGAGATGGGGT
TTCACTATGTTGGCCAGGCTGGTCTCGAACTCCTAACCTCATGATCCGCC
TGCCTCGGCCTCCCAGAGTGCTGAGATTACAGGCGTGAGCCACCACGCCC
AGCCAGCTCTTCCTATGTATTTATGCAAGTACAATAACTAGGGTTTACCT
TTTTAAGTATATTGATTAAGTTTGGTTAAAGAAAATAGATCTGCTAATAC
CGAACTTGATTTAAACCACTTTAATTACTTTTACTTGGAATGTATCTGT

[0452] In some embodiments, the intronic domain that promotes trans-splicing primarily in the brain comprises or consists of sequences from the gene AMZ2. In some embodiments, the sequences from gene AMZ2 comprise or consist of:

(SEQ ID NO: 399)
CCGCGGCCCCCAACAAATAAAGAAGGGAAAGTGCTGAGGGTGACGGCCCC
GGGGAGCGCTGCGGCTCTACGTCAACCTGCGGCGGCCGCCGACTCATTTG
GGGCCACGCTGGTTGCATTCGTCACGCCGGCGATGCCTCTCAAACCCGCG
GCCTGCCGAGGACGTTCCCACACGGGAGACCCCAGCGACGCGGGCGCATC
TGTGGCTCTCGAGAACCGGGCCGCGGAGCCGCCGCGAGCGCAAGCGAGGA
ATCGGCGACTGCGGGGGTGGACAGCTGGGGCTTGTAGTCCCCTCGCTACC
CTCTATTCTGGAAGAGGCGGGTCGCGGCCGCTGAACTCCAGCTCTGCGCC
TGCCCAGGCGGCCGCACGCTCAGGGGCGTGGCATGGGTGGGTCGTGAGTT
GGGCGGGGCCCACAGGGCGTGCGCGACGCAGCGGCGCGGCGCGTGGCGTA
AGGGGCGTGGCGCCAGTGGGCGTGGCGTGGCGCAGTGCGAAGGGACGCG

[0453] In some embodiments, the intronic domain that promotes trans-splicing primarily in the brain comprises or consists of sequences from the gene AMZ2. In some embodiments, the sequences from gene AMZ2 comprise or consist of:

(SEQ ID NO: 400)
TGAGGGCTGCCGCGGGTGGGTGGTATCGAGGCCTGTCGGGTCAGGGCGGT
TCGCGGGTGCTGTCAGAGCTGGGCCGGGGCCCCTAGGCAGGGTAGCCGGG
TCGTAGAGGCGGGGGCCGGTCGCGGTCGGTGGAGCGGGATGAGGATGTAG
GAGGGGCGGACGTGGCGGAAGCCGCGGGGTCCGCGGGGTCGGTGCCTCTA
GGGAGCCAGGGAGGCCTTTCCCGAGGCTCCTGGGGAAGAAGAGGCGAAGC
GAGAGTCCCTGGGGAACCCCCACTCCACTCCCAGCTGGAGACTGGGTTGT
GTCTGCATGGACCAGAGCCCACAGTGCGAGTTGCTATAGGCAACCAGCCA
GGGTGGCCAGCTCCTTCCCGTTTGCCCGTGATGTTCTGGTTTTGGGACCA
AAGCATCCTAGGCCTCCAGCCCACTGCAGTGACCGAATTCTGCGCCCCCT
GCCCATCTTCTCCCGCAGCTTCCCTAGATTAGGCTTGGGAGGCAAGAGG

[0454] In some embodiments, the intronic domain that promotes trans-splicing primarily in the brain comprises or consists of sequences from the gene TTYH2. In some embodiments, the sequences from gene TTYH2 comprise or consist of:

(SEQ ID NO: 401)
GTGTGCGCGTGCGTGCATGTGGGGCTCTCGGGAAGCTCTGTATCT
GGAGGGGTGTGTTATTCCGCACCCTCGCTATACACACATTTTCTA
GACCGTAAGTGCTGTGATGCACTAACCTCTAGGTGCTAGAACCCT
GCACGGCACTGAGTAAGTACTCCATAAATGTCTATCAACTTAGCA
AGTTAGTGAGTGATGCTCTATTGTGGACCCCTGAGGCAGTGGCTC
CTGAAGGAGGACGGGGCCACCGGCAGAGCAGGGCACTCAGAGGGG
TCCCCTGCCCGGGGAGCATGTGCCAGAGGAGGGGGACATCCCTAA
GGAACAGGCCAGAGGACCTGAGCTCTCCCTGGCTGCTCTGGAAGG
CGGAGGCCCCCCAGTTTATCCAGTCCCTAGAGCACCCCAGGCCAG
ATCTGGGGTGCGCCTGGCTTGGAGGCCATGTCCTTGCTGCCGCCT
CTCCTGGGGCCTGCGTCTGCTCCCACCCTGCCGCATGGGCCTTAG
CAAT

[0455] In some embodiments, the intronic domain that promotes trans-splicing primarily in the brain comprises or consists of sequences from the gene TTYH2. In some embodiments, the sequences from gene TTYH2 comprise or consist of:

(SEQ ID NO: 402)
CCACCAGTGACTTCTGTGTGGCTCCTGACACCTTCATCCTGAACG
TCACGGAGGGCCAGATCAGCACAGGTAACTACACACTCTCAGGCT
GCTGCTGTGGATGCATAGGTGGCCGGACTCTGTGCCCCTACTTAC
CTCTTTCAGCCCTGTAGCCATCCAACCCCTCCTCAACCCTGAACT
TCAAGTCCAGCTCATGCTCTAGGCCATTTCCTAGAAAGTGCCTCC
CTTGGGAGCTCAGGGACGGGGAGGGAGGTCTGGCTTGGCCACCAA
GGATGATAGAGATCTCATCTGGTCATTTGTGAGCTGCCTAACGTT
ATGCCGTTGCCCTGCAGAGGTGACTCGCTACTACCTGTATTGCAG
CCAGAGTGGAAGCAGCCCCTTCCAGCAGGTATGGCCCCCCGAGGC
CTGCCCTCACCCTGCCCACAGCCGCTCCCCCTTGACCCTAAGCCT
CACCACTGACCAAGATGGCGGAGGTGGCAGGGCCTTGCTTGCCTC
ACTG

[0456] In some embodiments, the intronic domain that promotes trans-splicing primarily in the brain comprises or consists of sequences from the gene HID1. In some embodiments, the sequences from gene HID1 comprise or consist of:

(SEQ ID NO: 403)
GTGCGCCACGGGGGCCCCGGCGTCCCCATCCACCTGCCGGGCTGG
GGGCTGGGCAGGGCCGGGGGTACGCGAACTTGGCTCGTCGGGAGA
TGGGGGGACGGGCGGGCCCCGAGCGTAACGCCAAGGCCAGCGCCG
GAACGGGACCCCGCGGCCTGTACCTGGAAGCTCCATCCCCTGGCC
CTAGTCCCCCACCCTCAGCCTCCTCTCCTGGGAACACCCCTCTCC
CCGAAGCCGCTGCTGCCACCTTAGGCTGACGTGTGCCTACTCCCC
GAGCCGGCGACACAGCTGTCCGCCCCCTGTCCCGCCCCGCGGCGT
CCCCAGCTTCGCATCTCCAGCCTCCCGCCGCCCCCACCCACCCAT
CCACCGTCCGCTCCCCTCCCTGCCCCTCATTGCCCGCGGGTCCCG
GACGCACAGTCCCTGTTGACTCAATGCAAACAAAGCCTGGCTGGC
GTCCGCCCGGGTCGGAGAAACAGCTGGTGTGCGCGGCAGCGGCCT
CGCT

[0457] In some embodiments, the intronic domain that promotes trans-splicing primarily in the brain comprises or consists of sequences from the gene HID1. In some embodiments, the sequences from gene HID1 comprise or consist of:

(SEQ ID NO: 404)
AGGGGTCGGGACCGCGAGGGACTCTCGCGCTCAGCAAGGCGAGGA
GCTGCTTTCCTGGAGTATGGAAACTGAGTCAGCGCCTCCCTCCCT
CATAACCAAGGGCCTGCGGGACTGTCTGAACACGTGGGTTTGACA
GGTCAGAAAAAGGGAGAACCAAGAGAGTGGATGCTCAGAAAACAT
GAATGGGAAAGACAGACTGAGAAGGAGGAAAGTGGGATGGAGAGG
GCCAGCTGAGACGTGGGCCAGGAGCCGGAGCGGAGATGAAGGGTG
AGGACCGGGGCGGGGGACGAGCTGCGAGGAGGGTTTTGGGCCCTG
GGGACTGCGTGGTAGCAGCGGAGGCGGGTACAATGCTCCGACGCA
GAAGGAAGAGCGTCGAGGCTCCGGGTGGGACCTGAGAAGGCACCC
GGCGTGCGGCGGCGCTGGGTTGGAACCGCCGACTCCGCGGGTCTT
CGGCGGCGGGCGCTGCAGGTGCAGGAGGCGGAGCCACGCGGGGGC
GGGG

[0458] In some embodiments, the intronic domain that promotes trans-splicing primarily in the brain comprises or consists of sequences from the gene SRP68. In some embodiments, the sequences from gene SRP68 comprise or consist of:

(SEQ ID NO: 405)
GTAAGACGAAGTTCGCTCTTTTCTTGAACGCCGGTTGCTCCAACC
ACTTAACCCCACTTGTCTGAGAAGGGTGTTGGCATGTTTGTTGGA
TTGCATGGAATTAAAACGGGCGCCGTAGCTCTTCCTTTCTGCTGA
GAATGTGGCTGTGGTATATGTGTGTTTCTTTTTTTTTTTTTTTTT
TTTGAGACAGGGTCTCACCCTGTCACCCAGGCCAAAGTGCAGTGG
CACAATCTCAGCTCACTGCAACCTCCACCTCCTGGTCTCAGTTGG
TCCTCCCACCTTTGCCTCCTGGAATAGCTGGGACCACAGGCATGC
ACCACCACACCTGGCTAATTTTTTTTGCATTTTTTGTAGACATGG
GGTTTTGTCATGTTGCCCAGGCTGGTCTCAAACTCCTGGACTCAA
GTGATCTGCCCACATCTGCCTCCCAAAGTGCTGGGATTACAGGCG
TGAGCCACCGCGTCCGACGCCATGTGTGTTTCTTAAGTAGTGGTG
CCAA

[0459] In some embodiments, the intronic domain that promotes trans-splicing primarily in the brain comprises or consists of sequences from the gene SRP68. In some embodiments, the sequences from gene SRP68 comprise or consist of:

(SEQ ID NO: 406)
AGACTGCAGAAAAGCCCATCCTGAAGGTTTCAAGTTTTGTAAAAG
CTGACCTAGGATTGATTGATTCATTTGGACTAATCAGTAACATAT
TACTTCTGGGCTTAAGATTTCTCACTGTCATAGGCACACCTGGGA
AAAGGTCTAGTCAGACCACCAATTTTTGTGCAGGGAGTTTTGCCA
CTTATGTTTAAGAGCACGTTCTGGTTGGTCCAGTGGCTGGCGGAG
AAGGTCGGTGTACAGGTGGCCAGGAATCCTGCCTCTGCGTGTTGA
GAGGAGTTTCTTATTCCACTGTCCTTTCAGGAATCATCTTAGCCT
TGAATATAGATTTATAGAATAAAAGTGTAAATAGCAAAATATATT
GAAGGCTTCCTGTTTGGAGACATTTTGCCCTGCCCAGGGAGAATC
ATGAGAGCTTCTCCTTCAGAGATTAGTGGTCTGAGTCATTGCAGT
GTGGGCGTCGTAAGAAAAACACAACTGACTTAAGTCCCGCCCTTC
AAAT

[0460] In some embodiments, the intronic domain that promotes trans-splicing primarily in the brain comprises or consists of sequences from the gene EXOC7. In some embodiments, the sequences from gene EXOC7 comprise or consist of:

(SEQ ID NO: 407)
GTAAGCAGTGCGGTTCTGCAGCCCCCTCCTGTCCCTCTGAAGCTT
GGTGGGTGAGGTTCCCTGGGGACTGACTCTCAGTACCTACTGGGG
AGCCTGAGTCAGAGGGGACATGAGTTTTCTCGGGGTGCTCTCAAC
TCTCTCTGCTCCCTTCAAGGCCACTCTGTCTCTGAGCTTATCCGC
AGCACCTGCCCAGGCTAGAGCCCTGGATACACCCCCTAGGCTCGC
CCGGCCTCCCTGCCTTGCTGTCCCCACTCGGCCTTCCCCACTGTG
CAGGCCGCAGCTTCGTCTGTTCAGTAGGGTCTGGTAGAGGGGATG
TTCGAATGTAGGGGAGAAGGTGGAGAGGCTGTGGGGAGCCCATTC
TAAGACTCTGCTGTTGACAAAAGGAAAAAGGGGGCCTTGTAGAAA
CCACCCAGGGTGGGTGGGGGCAGGAGGGGACAGGGCGCTGGCATC
TCACTCTTTTCCTGCCAGCTTTTCTGCTGACATGGGCCAGCTCCA
TCCC

[0461] In some embodiments, the intronic domain that promotes trans-splicing primarily in the brain comprises or consists of sequences from the gene EXOC7. In some embodiments, the sequences from gene EXOC7 comprise or consist of:

(SEQ ID NO: 408)
TGCTGGTTGGTTGGAAGGTGTCCTTTCTGCCCCTGCCCCCCTCCC
AAATCCTTCTCTCGTGTCTGCCTGCTCTCCTAATCAGGCTCGCTC
AGCTGGCCTTCAGAGGGTAGCAAGTGTCTCAGGGCCCGCTGGGCG
TCTTCCTGCTGGCCCTGCCCTGGGACTGGAGCTCAGGGGGTTGGC
CTGTAAGCAAGAGCACCTTTCTGGGTCATTCCAAGCACTGAGGTC
CCTGGGCCCTCTCCTCCCGTCCCATTTTGGGGGCAAGGAGCCTGT
GGGCAGCCTCCAGCCTGCAGTTCTCAGCTCTCTACTTTCCAGGGT
GTTCCCTGGTCCTCAGAGGGTCCCGCCTGCTGTGTCTTGCTATCT
GTGTTTTGGCTGTCGTGGGGAGAGGTCTGCTTAATTCGGGTTGAC
ATGCCGTTTCTAACCTGTTTTTTGCACTTTGCATCTTTCTCCCTC
CTTTGTCTCTCCCTCTGTCCCCTCTGTGTGCACTGCCTTTCACTC
CGTA

[0462] In some embodiments, the intronic domain that promotes trans-splicing primarily in the brain comprises or consists of sequences from the gene SEPT9. In some embodiments, the sequences from gene SEPT9 comprise or consist of:

(SEQ ID NO: 409)
CAGTCTTCTCCCAGACACTCCCCCGGCTCTGGCCTGGCGCCCGGA
GACCAGTAGCAGCAGCTCCCCACGGCCGTTCACTGTGAGGGTGGG
GAGGGCCGTGGGACCAGGAGGCCTTAGGGGGAAAGTTGGCCATGA
GGAGTGGGAAGCGACGGGTCAGATGCCAGTGACTGCTGGCTGGGG
AGCCGCTGGACGTGGCTGGCCTGTTTGGCCAGTGTGGCGGGTGCC
CCGGGGCTTCAGTCACCCCCAGCCACGTGTGGGGGTGCGGGATGG
GAAAGGTAAGAGTGTGTGGAGCCCAGTCAGCACTCAACATGAGGT
CCCGTGGGGGCTGCCTGAGGGCGTAGCTTCCAGAATTCAGCCCCT
GGCCCTCAGAAGGTGTCACCAAAGGCTTCTTTCCATTTGAGTGAA
TCCCTCCCAGCCCCCAGCAAGCCCTCGGAACGAGCCCACTCCCAG
GCGCTCTCTCCTAGTGTGGGAGTGGCCACGCCCCTGCTGGGAGTG
ACTC

[0463] In some embodiments, the intronic domain that promotes trans-splicing primarily in the brain comprises or consists of sequences from the gene SEPT9. In some embodiments, the sequences from gene SEPT9 comprise or consist of:

(SEQ ID NO: 410)
TGAGCTGCGCCCCCATCCCCTGCCCCTCCTCTCCTGCTCCTTCTC
CCTTCCATGGTCCCAGCCAGCAAGCACCTGGGGTAGAGGGGACAA
ACCCAGGTGGCTGTGTTCCAGCCCTGGCTGCAGGTCTGAATGGCT
TTCTGGGGTGGCTGGCCATGCTCCCTGAGAGCCCAGCTGTGGCGA
TGTCTGAGCAGGTAGGTGGGGGAGCACCTAGGAAGCAGGGGTGTC
AGGCAGAGCACAAGGAGAGAGGGTGTCCAGGTCAGTTTCAGGACC
TGGCTGAGAGGAGGGGGCTCCTCACGGGCACCGCCTCTGGCAAGC
ACAGGGACAAGGGCAAGGACGGCATGGCCAGAGGTCCCTGGGAGC
CTCTTCCCCTCTCTTCTTCCTAGCAGCTCCCCCTCACTCTTCCCA
GGGACCCTGTCACTTTCCTTTAGCGTGTGGCAGCTCCTTGGCGTC
CCTCCCGTGCCTTCAGGTTGCTTCTGCGCCGGGCCTGCCGCTGGG
CGCC

[0464] In some embodiments, the intronic domain that promotes trans-splicing primarily in the brain comprises or consists of sequences from the gene ANAPC11. In some embodiments, the sequences from gene ANAPC11 comprise or consist of:

(SEQ ID NO: 411)
GGCCTGCGCCCCACCGCCGCGGCCGCCCTGGGAGCCGGCCCGGCC
GCGGCCCCGGCCCCCGCCCCGGCCGCCTCGCTGGCTCCGGTTCAG
TTTAATGATGTCGTCCAGAGACATGTCCATTTTGTCGGCCATGGC
GGGCGCGGAATCGGGCATCGGCTCGAGCCCGCGCGTCAGCACGCC
GGCACGTCACTTCCGGCGCCGCGTGAGGCCTTCCGGTGCCACGGC
CTCGGAGCGGCTGCTGATTGGCCGCTGGCGGACGGCTGCGCGCGC
GGGACGGGGTGAGGCGGGGAGGCGCGTGCGCACTGGCGTGCGAGA
CTCGGCGGGCGCTGTTGAGGGAGTCGGGCCGCGACTGTGGTCGTT
TTTATACCTTCCCGCGCGGACGCCGGCGCTGCCAACGGAAGGGCG
GGTAGGGCGGTGCGTGATTAGGTTGGCGAAGGTGCGAGGGCGCAG
GGGGTGGGGCGGCGGCCGTTGGAGGCGGAGCCTACGCGCCCCTCC
CTCC

[0465] In some embodiments, the intronic domain that promotes trans-splicing primarily in the brain comprises or consists of sequences from the gene ANAPC11. In some embodiments, the sequences from gene ANAPC11 comprise or consist of:

(SEQ ID NO: 412)
TTGGTTTTTTGGTCTCCACCTGCAGCCCCCCCAAGTCTGCACTGT
CACATTTTGCCAGTCATATCCTTTACAAGTTTTCTTGCGGGCCGG
GCGCGGGCCTCACGCCTGTAATCCCAGCACTTTGGGAGGCCGAGG
CAAGAGGTTCGCTTCAGCCCAGGAGTTTGAGACCAGCCGGGGCAA
CATCGTGAGACCCCCATCTCTAAAAAAAAAAATGAGCTGGGCATG
GTGGTGCACTTCTGTACTACCAGCTACTTGGGAGGCCGAGGTGGG
AGGATTGCTTGAGCCCAGGAGGTCGAGGCTGCAGTGAGCCGTGGT
GGCACCACTGCACTCCAGCCTGGGCGACAGAGCCAGACCCTGTCT
CCAAAAAAAAATTATTTTTGCAACTTATTAATGAAAACCAGTGTG
CCATTTCATTGATTTTTTTTTTTTTTTTTTGAGGCAGTCTCATTC
TGTCGCCCAGGCTGGAGTGCAGTGGGGCGATCTCGGCTCACTGCA
ACCT

[0466] In some embodiments, the intronic domain that promotes trans-splicing primarily in the brain comprises or consists of sequences from the gene NARF. In some embodiments, the sequences from gene NARF comprise or consist of:

(SEQ ID NO: 413)
TGTCATATAAATGTAGCTGGGTACAATGGCTCAGACCTCTAATTC
CAGCCACTCAGGAGGCTATGGCTGGAGGATCACTTGAGCCCAGGA
GTTTGAGACCTTGCTGGGCAACACAGTGAGACCTCGTCTCTTTTT
TTTTATTTTTTGAGACGGAGTCTCACTCTGTCACCCAGGCTCTGC
AGTGGCTCCATCTTGGCTCACTACAACCTCCGCGCCTCCTAGGAT
CAAGCGATTCTCCTCCCTCAGCCTCCCGAGTAGCTGGGATTACAG
GTGCGCCCCACCACACCAGGCTAATTTTTGTGTTTTTAGTAGAGA
GGGGGTTTCGCCATGTTGGCTAGACTGGCGACCTTGTTTCTTAAA
AAAAAAAGGGCTGGGTGCAGTGGCTGACACGTGTAATCCCAGCAC
TTCAGGAGGCTGAGGCAGGCTGGTCACCTGAGGTCAGGAGTTCGA
GACCAGTCTGGCCAACATGGTGAAACCCCCGTCTCTACTAAAAAT
ACAA

[0467] In some embodiments, the intronic domain that promotes trans-splicing primarily in the brain comprises or consists of sequences from the gene NARF. In some embodiments, the sequences from gene NARF comprise or consist of:

(SEQ ID NO: 414)
TGAGACTCCATCTCAAAAAAAAAAAAATGCAACCAGTGTATATTT
CATCATCCTATCTCTGTGAGCTTGTTATACACAAAAGTTTTCTGT
TTGTTTCATGCAAAGTAGGCCAAAAAAGTTTACAGATTTTCCACA
TGGGAAAATCATGGAGAGATTGTTTACATAAATCCCACAGTTCAA
GGGCAGAAAGAGGAATGGAAAGAGGAGTTAGAATTGAATTCTGCT
TACGTTTTATTAGTGTTTCATTTTATTGGCCTCACTTTGCCCTTT
AGATGGACTCCTGCTGTGTGTGATGGAGATTTCATAAGAGGGAGG
TCACCCAGGGTCACTAATGTCAAATCTCCTGCAGGGGAAGAAAAG
TTCCTGTGGCCACCTGTGTCTTTTCAGTGTCTTACTTCGTTTGTC
TGCAGGTGAAATTGCTCAAATAATGGAGCAAGGTGACCTCTCAGT
GAGAGATGCTGCCGTCGACACTCTGTAAGTGGCTTCTCTGGGGAG
AGTC

[0468] In some embodiments, the intronic domain that promotes trans-splicing primarily in the brain comprises or consists of sequences from the gene EPB41L3. In some embodiments, the sequences from gene EPB41L3 comprise or consist of:

(SEQ ID NO: 415)
GTGGCCATTTGTTTTCGTCCTTGGTGTTTCTGAATGTGCCCATGT
GCCTTTCCTTACCCTTTTTTTGGGCGTGAGTGTGTGGTTGCATCC
AGCTGGCTTTGCCTTCAACATCTCAAAGGTGTCTTCACTTATTGT
CCTTTGTGTCTGCTTGGCATATCTGTCACATGCCTTTAGTTGCAT
CTCAAGAATGTACTTCACTATTCGAAAGGCGATCATATTGAGAAA
TTTTAATAGAATTAAATATCTAAAAGCATTATGTCTCACCAGTTG
AGTCTAAGAAAGCAGCCAAAACCAACGTGAATGCGCTGCAATGCT
TTGGTTTTTGTTTTGTTAATTGCACTTTATCCTGCCTTCCGTTTG
TTTTGCGGATGTCCTGAAGCAGCAGCGCAGGTTCAAGTGCATGCA
CCAGGGGCAGGGGCAGGCATCAGAGATTTCAGTGGGAGAAATGAA
AGCTAATTTATATTTTTCGTCAGTGTTTCTGGTTATAAGCACTTG
CTGC

[0469] In some embodiments, the intronic domain that promotes trans-splicing primarily in the brain comprises or consists of sequences from the gene EPB41L3. In some embodiments, the sequences from gene EPB41L3 comprise or consist of:

(SEQ ID NO: 416)
GTGTCACTCATTGGGGCCACAGTTTGCAATTCCAGCATGACAGTT
TTTGAGGCAGTCCCCTTCCACCCCAAACCTTTCCGTTTCTCTTGC
TGCTTGGCTTTATGTTGAGAGCAGCCAACCCAGCTTCTTAATTTT
TTTTCATGGTTAAATCAATACCGCAGTGCAAAGTCAGCATTAAAA
CACTTTCCATTTTATTTCCAGCTCCCTGTTCCCAAGATGTGATAG
TGCTGCTGTGGCTTGCAATGAAGGGGAAAAAATATATATATCTGC
TTAAATCGGCGCCACCCTGATCCTAATAACCGTCTCTGCTTTACC
AAACAAGAGCACCTGGTTTTCTATTTTATTTCCCATTCTTTTCGT
TTCCAAACTCTGAGATTCCTTCGTTCTTCCTCCTCCCTGTCTCCT
CTGCCTACGATTTTGTCTAACAAGCTGTGAATGTTTATGTGCCTG
AGTTTGTGTCTCTCTTTTGTGCTTGACTCTGCCTCTCTTTGTTCA
CTCA

[0470] In some embodiments, the intronic domain that promotes trans-splicing primarily in the brain comprises or consists of sequences from the gene PSMG2. In some embodiments, the sequences from gene PSMG2 comprise or consist of:

(SEQ ID NO: 417)
GAGATGGCCGCACGGTCTCTAGCCCGCAGGGCTCTCAGAGTCGCA
GGCGGTGACGCCCGGTCGGGGGGCCCGGTCGCAAGGGACACACAG
CTGGGGGCGCAATGGTGAGGGCGGCGACGCACGGTCCGGAGGGGA
TGCGCGGCCGGGTAGGGCGTGCAGGGTTGTGGGGCGTGGGGGACA
CGCGGGGCCGGGCGCGCGGTCGGGGGGCGCAGGGGCAAGAGGGTG
TCGCATTTATCAGGGAAGTCCCCGGCCGACTCTGGCGGGGAACTG
GGCGCGCCAACCCGGGTCACCGCCCTGCACAGCGGGAGAAGTCAC
CCGCATTGACGTTCCCTAGGCGCTGGATCGCCGAAGGTCTGGTTG
AAAACTTGAACCCGCCTGGAGCGGATGCCTAAGAAAATGCAGGCC
CGCTGAAGCCTCCCCGCCGGGCCCTGGGCCCTGAAAGCCTCCGGC
AGTTTCCCGTGACCCCGCGGCCGCTCTGCGCGTTTTCCGATTTCT
TGCT

[0471] In some embodiments, the intronic domain that promotes trans-splicing primarily in the brain comprises or consists of sequences from the gene PSMG2. In some embodiments, the sequences from gene PSMG2 comprise or consist of:

(SEQ ID NO: 418)
TAAGCACCGTAAAGACGGGGATCTTTACGGGTTTTCCTCACTGAC
TTCTCCCAAAAGCTAAACCAGCGCCTGGAATATAAACATGTACAT
AATTTGCAGGTGTTAGTTTTAGCGTCCTTCCGGATTCATTTGTAA
CATTGGTCCCTTCCCTCACTAAGGTAATGTCTCAAGTACCACACT
CATCAGAGCATGTGGAATGAATATCACAGTGGTAAAATTGAACTG
AGGGCAATTAGCCGTAGAAAGAAAGAATTCCGCCCCCCCAACCTA
TTAAATATGCAATAAAACAGATAATTCTTAATCACCCATTGGTAG
ATTAATTTAATCGATAAAATTCCACTGAGGCTAGTCCTGTGTGAA
AGCCCTACAGAGTGTTGAAAGCATCAACCAAATAGGCAATGTATA
TTAAGTTCCAGTAAACCTTTTACGGCAGTTTTATGTAAAATGTTA
GAAATCACGCTCTCAACAATTGCATCTTGCGGTAGAAACTACAAC
AGTC

[0472] In some embodiments, the intronic domain that promotes trans-splicing primarily in the brain comprises or consists of sequences from the gene DTNA. In some embodiments, the sequences from gene DTNA comprise or consist of:

(SEQ ID NO: 419)
TAATTCAAATTTCCTACCAAAGAAAGTTAACCGTCTCTTGAGGCA
TTTGAATTATTTAGAACTGTTTTCAGATAATTTGCACATCTTTTT
TAGGGCCCTATACACCTGCCTCAGGAAAGAAAAAAAAATCTGTTT
GTCAGATGTAGGCAACACCACTCGTTAAGTAAGCCATTAGTCACT
CTATTTTTTAAAAAATAACTTAATTATCTCATCCACACCAGTTTT
CCATTCTCTGCCCATCTTCCTTTCTTTTTTCTTCCTCTCATTCTC
CGTGTCTCTGATATTCGCTCTCTTCCCACTGGACAATCAGCATTC
ACCCCTTGTGCTTCTGAGTCTTCCAGTGAGCTGTGCTGGTCTCCT
GGAGACAGAGAGCAGTTTGGGGTAAAGGCAAGTCTGTTTGGCTAA
TTTAAATTCTTGTAATGTGAGAGATGGGAATAGAAAGAGCAAATG
GCATTACAGAGATTTTTGTTGTTAAAAGGACACCTCTTCTCCATC
CCAT

[0473] In some embodiments, the intronic domain that promotes trans-splicing primarily in the brain comprises or consists of sequences from the gene DTNA. In some embodiments, the sequences from gene DTNA comprise or consist of:

(SEQ ID NO: 420)
CTTCCATCCGGTTGAGTGTTCCTACTGCCACAGTGAGAGTATGAT
GGGATTTCGCTACCGATGCCAACAGTGTCACAATTACCAGCTCTG
TCAGGACTGCTTCTGGAGGGGACATGCCGGTGGTTCTCATAGCAA
CCAGCACCAAATGAAAGAGTACACGTCATGGGTAAGGCAAGGTCC
AGGCAATACTTGGAGTTGGATGTGTGAGTGTTGCCCAGAGTTAAA
GGGAATATCAAGGATGGTGGCAGAATTAAAGGGCAAACTTACCTT
CCATCCCAGGTCTAGTATTCAGTCCCCCTTCCTCCCACTCTCCAC
CCTACTGCGTGCTCTTACTTATTCTGTTGGAACCCAGTGTAGCTT
CCTGAGATTTAAAATATAGGAAGACTCAAAACTATGTTACTTCTT
GGAATATAGATAATTCAGTACTGATTTAAATAACAACTGAATAGC
AAGGACCTTCTGGAACATAATCTTACATTCACAGTAAGTTAAAAT
CTTT

[0474] In some embodiments, the intronic domain that promotes trans-splicing primarily in the brain comprises or consists of sequences from the gene MAPRE2. In some embodiments, the sequences from gene MAPRE2 comprise or consist of:

(SEQ ID NO: 421)
AGCCTGCACTCCATTTTCCAAATAGAACCCAAATATCAACAGCAT
CAACAAGCAGATTTGAAACCCCCCAAAAACACGCTATTATTAAAT
TGTTAATTGTATTAGAATTGCCTAGTTTAATTAGTAATATTCATG
ACAAAACTAGTTTGCCCCTTATCATCAATCGTGCTCCAGGTAGGA
GTACAAACACTGGGTGTAAAAAGCAGATGCACCCCAGTTGGTGTG
CAAGCCCCCGTTTGCAGGTAATTAATTCACAGTGTGGCGGCGCCT
TTTCAAGCCCCCTCTGCAAGCCGCGCCGGCCTCCTCCCTCTCGAG
CGGGGTCAAACCACTTAGTTTATTTCACCCGCTGGCACTTTCTTC
CCTGTCACGAATTCAGCCTGGCTTCCTTTGGCCTGAGACAGCGTC
TTCAGGCGGGTCGGCTCGGACCTGCCCAGTGGGGCGCCCACCTGC
ACCCGCACCCGCACCCGCACCCGCGGGAAGGGGCGGCGCTGGCCG
GACT

[0475] In some embodiments, the intronic domain that promotes trans-splicing primarily in the brain comprises or consists of sequences from the gene MAPRE2. In some embodiments, the sequences from gene MAPRE2 comprise or consist of:

(SEQ ID NO: 422)
TGAGTCAAGTGCATTTAAAGCGGTACCGCCCTGGCGCACCCCGAC
ACCCCCTGCACTGAAGCAGTCCCTCCCAGGCCAGGGGCTGGCTGC
GCCTCCTCCTGCCGCTGAGGTCTGCAGCCCGCGGGGCTCGGAGCA
ACCGGAACCGGGGGTCCAGAGTCTAGCAAGAAGTTGTGCAAGGGT
CGGCTAGGCGGTCTCCGGGTGTGCACCCCGCCGCTCTCCCGCGGG
CCACATCTCTGGTTCGGTGCCCCAGCTCTGTGCACCCCAGGAAAG
TGGAGGGAGGGAGTTGGGGCTGCCACGCTGGCAGAAGCGAAGTGG
ACTGGTTCTGAGGGGTGAGGCTGGGGCTGTCCAGGGTAGGAACAC
GGCGTTGGTGAAGGAGGGGGGCTCGCGACTGCGCGACCGCGGCGC
ACGACCCTCCAGGCTCTAGCTGGGGCGCCGGCACTGAGAGAGCTG
GGGGCTCTGGCAGGGGCTGCGCGCTTGGGGGCAGATCAGGAAGTG
CAGC

[0476] In some embodiments, the intronic domain that promotes trans-splicing primarily in the brain comprises or consists of sequences from the gene CNDP1. In some embodiments, the sequences from gene CNDP1 comprise or consist of:

(SEQ ID NO: 423)
CCACTCCTTGTGGAACCTCAAGAGGGTGTCTCAGCTTCCCAACCC
CATTAGGGATTGGTCCTTCCTTCTGAAGGCTCCCATGTCACTTAA
AACTAGGAGCAAATCAATCTGTTATGCCTCTTCTCCAATTCAACT
GCCCTTTGCAAGCTGATTTTGCAGCGAACCTTCAGAGAGCTGGGA
AAACTCTACCCTCGGCCCCTGCACAGCCCTAGGAAGCTAATCCTC
GGCCGTAACATTCCATCACAAGGGCCCACAGCCACAGTGTGTGGG
GGCCTGTCATGTGAGGGGGCTGTCACCTGAGGGGGCTGTGCCGCT
GGCTCAGCTCTGCCTGCTGGCCGGGGCCCTACTCCCTCTCAGAGA
TGACACACAAGTGCCCCCAAAGAAGAACCCGAGGAGTCGCAGGCT
GGGCCAGGCTGCTGGCTTCCAGTGACATCACATGACTTTGGGGCC
ACTGCCTCATCCCGTATCTGCGCGTATGAGATGCATTGTCTCTTC
CTCT

[0477] In some embodiments, the intronic domain that promotes trans-splicing primarily in the brain comprises or consists of sequences from the gene CNDP1. In some embodiments, the sequences from gene CNDP1 comprise or consist of:

(SEQ ID NO: 424)
TGAGTAGGACCTCCTCCATCAGAGTCCGTGCATTGGGTGCCAGAA
TTCCATTTGTCCCGGGAGCATGTGCGTTAAGCCCAGTTGGGCAGG
GCAGGCACCCAGCGTGGCCCCAGATGCTGCTCCTCATGGTGTTCT
TAGGTGCTGTCTTGGCCGAGGAATGTGGTATTTGGAATTATATTT
TATCAGTAATGCTTTTGGGTAGTTGTGTGTTCTTAACAATAATTA
AATGGCATTATTGTCAAGTAGTTCATATTCAAATTGTTCATGAAC
TCAGTCTTCTTAAATCAATTTTTTTCTGTACTTTTTCTCTTTAAA
AAAAATGAGTTTGCTTCCTGGAAGAATTTGCCTAAATAATGGTAA
CAGACAGTGTGCTGTTTGTCCTGGTCCCAGGTTCCCGACTTAAGG
GCTAGTTTGCAAGAGCTAATCACCGGGCTAAATCACCCCAGGCCT
TTCTCGGCGAGGTTTCCATGGTTCAGGTGCAAACCTGAGTGTGGG
TGTG

[0478] In some embodiments, the intronic domain that promotes trans-splicing primarily in the brain comprises or consists of sequences from the gene C19orf25. In some embodiments, the sequences from gene C19orf25 comprise or consist of:

(SEQ ID NO: 425)
GTGGGAAGAGGCCGGCGACTGGGGTGACCGCGGGGAAACTGAGGC
AGAGGTTGAGCCAGACCCTGAAGCCTTGGCCACCGTGTTTTTGGG
CGGAGGGAGGGTCAGGGCCTGGGGCGAGCTCAGAGGGGCGGGACA
GGGCGGGCTTCCCCGGGAGCGGGACCGCGACGGGTGCGTACGAGT
TCGCTGGGCGGGAGGAGCAGCCCGGGCAAGGGCGGAGAGGTGGAC
GCCCCGGTCAGCGCCCCCTTCCCCGCCTTCAGAGATGGGCTCCAA
GGCAAAGAAGCGCGTGCTGCTGCCCACCCGCCCAGCGCCCCCCAC
GGTGGAGCAGATCCTGGAGGATGTGCGGGGTGCGCCGGCAGAGGA
TCCAGTGTTCACCATCCTGGCCCCGGAAGGTAGGGGGAGCCCGGT
CCCGGGGAAAAGCGGACCTGAGACCCCGGCAGCAAGGGGACGGGA
GAGAAGCACACCCCTAACTCCTGACCCCACGCCCTGGGAACCCCC
GCAA

[0479] In some embodiments, the intronic domain that promotes trans-splicing primarily in the brain comprises or consists of sequences from the gene C19orf25. In some embodiments, the sequences from gene C19orf25 comprise or consist of:

(SEQ ID NO: 426)
ATGGTATGTAAACTGCATCTCAATAAAGCCCCTGAGAGAGGAAAA
GGGCCCTCTGCTCTTTCTGCCTTCCCAGGCATCAGCGGAGAGGAA
AAGGTGACCTCCAGCACCGTCCCCGAGGTGGGAGGACCCGCCTTG
GCCGGAAGTGGAGGCGCCGCGACCGCCCCGCCCCCGCTGTGTTCC
GGCCGCCGAGTGCTCATGCACCACCAGGCTCCCTTAGGTGGACAG
CAATTTTGTGCTCCCGTCAGCCACATGGGTGGCGTGTCCCCTAGT
GCCGTGTTCCCCTTTTCAGAAAGACGAGCCTCGGATGCTTTTCTA
CCCAGCCAGTGGAGCCTGGACTCGAACTCGCTCTCATCGTAGCGC
GTCCAGGTTCGGGTTCGCCTGAGAGGCTGAGATCCGAGTCTCAAG
GGCACTATCCCTTTAAGACGGGGCGGAGCCCCGCGATGAGCGGCG
GGCCGGCGGGAGAGGAGGCCGGAAGTGTGTGTCACGTGTTCGGGG
ACGG

[0480] In some embodiments, the intronic domain that promotes trans-splicing primarily in the brain comprises or consists of sequences from the gene SHD. In some embodiments, the sequences from gene SHD comprise or consist of:

(SEQ ID NO: 427)
TCCCTCCTGGAATCCTTCCTAGAGCTGTCTGGGATTTCCTGTTAG
AAACCACATCTTTCAAATAAGGAAAACCAAGACTCAGGGAGTGAC
AGACCCTGCCCTCAGCCCCGCCGGGCTGCCAGGAGGCCCCAGTCA
TAGCAGTGTTGGTTCTGACTTCTGTCTTGTCCTCCAACTGTGCTC
TCCAAGCTATGACCTGTGCCTGACCAGGGGGCTGGCCACAAGAGG
AGAGAATCTGGGGTCCCATCCTTCCTGACCACCCCTCTCTCACTC
CCCTCATTAGGAGGAACTGGGCAAGCCCCCTTATGGGGAAAGAAA
AAAAACGGTTCTGCACTGGAAAATTGGCCAGTGGCTCCCTTTTCC
TCTCCCACCCCCCAAACCTCTCAGTGCCCTCACCCTCAGACAACG
ACAGCTGACAACAGGCAGCCAGTTCAGGCCAGACCCCTCTCACTT
CTGCCCCTCTTCCCGCCACCGCTCCCCCCCACCCCGCCCCCAGAA
GCCA

[0481] In some embodiments, the intronic domain that promotes trans-splicing primarily in the brain comprises or consists of sequences from the gene SHD. In some embodiments, the sequences from gene SHD comprise or consist of:

(SEQ ID NO: 428)
TGCGTGGCTGGGTGGCCTGGGGAGACTGGGTGGAGGGGAGGCTCA
GGATGGGCTCTCTGGATCGTGGAGAGCTTATTTTATGTGTGATCA
CAGGAGGGGACTGGGGCACCAGACAGACCCTTCCCAGTCCTCCAG
ACCTCCACCTGCTTGGGGAAGTCTGTTCTTTTTATGTATTTATTT
ATTTTGAGACAGTCTCCCCCTGTCACCCAGGCTGGAGTGCAGTGG
TGGGATCTCGGCTCATTGCAACCTCCACCTCCTGGGGTTCAAGCG
ATTCTCCTGCCTCAGCCTCTCCAGTAGCTGAGATTACAGGTGTGT
GCCACCACACCCGGCTAATTTTTGTATTTTCAGTAGAGACTGGTT
TCACCATGTTAGCCAGGCTGGACTCAAACTCCTGACCTCAGGTGA
TCCTCCCGCCTCTGCCTCCCGAAGTGCTGGGATTACAGGTGTGAG
TCACTGCGCCCGGTGGATATCTGTCCCTTTTCAATGCATAATGCT
GGTT

[0482] In some embodiments, the intronic domain that promotes trans-splicing primarily in the brain comprises or consists of sequences from the gene UBXN6. In some embodiments, the sequences from gene UBXN6 comprise or consist of:

(SEQ ID NO: 429)
GTAAGTTCATGGGAGGGGCCTGAGAGGAGACGGGTGAGACAGACG
CGTCCGAGCAGGTTGGGAGAAAGGGCTTCTCTGCGAGGCTTCTCT
GCCAGGTCACTGTGCCACGTGGGTTACGGAACTCTCCTTGGTGTA
GGGCTCAACAGGGTGGAGCCACGAGTCCATGAGCTCTTCGTACTT
GCACAGCCCTAGGCCTGGCATGGAGTGGCCAGGGCGAGGCTGGTT
CTGCTGTCCGCTCTCCCCAGGGTCCCGCCACGAGGGTGGCGTGGC
ATGGGGCACATCGCCCGGACTTCCTGTCCCTCTTGGGTTTAGGAA
TGGGATGGTGAGGCCTCCCTGGCAGCTTGTTAGGAGGAGTAAACC
AAGCGAGCCGACCAGCTCCCAGCAGGGTCCTGGCACACAGTAGGT
GCTCAGCAAACGAAGCTGTGACCTGAGGGTGGAGAGTCTTATGGC
AGGGAGGGAGGGAGGATGTGACACCCCTTGAGTCTCCTCAATTCC
TGAG

[0483] In some embodiments, the intronic domain that promotes trans-splicing primarily in the brain comprises or consists of sequences from the gene UBXN6. In some embodiments, the sequences from gene UBXN6 comprise or consist of:

(SEQ ID NO: 430)
TTCTCTCCCTGCGGCAGCTCTAGCCCTTTCCAGACCCCCATCCTC
CTCCCACTCCCCCGGAGAACATTCTGGGCAGAAGGTGCAGACAGT
GCAGGGGCCTGCAGTGGGGAGCAGCTGGGGTGTGGGAAGAACTGC
GGGGAGCCCAGGGGAGACAGGCCACGGGAGGGCAGTGGGCCAGGC
TGGGAAGGGCTCTCTGGCCAAGGGAAGCTTTAGGATTTTGCAGTG
GGAGGGCGTTGTGCAGTGGAGTGATGCTGACGCTCCCTGGCTGAG
GTTCCAGAAGGGTCCCTGTGGCTGCCCAGGGGGGCAGGGTCCATG
GCTGGTTGGGGTGAGGTGCCCTGGGAAATGGCATTTTGTTGGAAA
GACCCAGATATCGGATGAGGCCGGGGTGGGTCTTCATGAGTCATC
TCCTCTTCCACCCAAGATGCTCAGCTGTGGGAGGACTAGATAGGC
AGGGGTGGGACGAGGAGGGAGGGCTGCCCGGGTATGTAAGCAGAG
CCAG

[0484] In some embodiments, the intronic domain that promotes trans-splicing primarily in the brain comprises or consists of sequences from the gene TNPO2. In some embodiments, the sequences from gene TNPO2 comprise or consist of:

(SEQ ID NO: 431)
GTGTGTGTAGGGGCCTGTTTCGGTGGGGCTTGGTTGGGTCTGATT
GGGGGAGGCCGCACTGAAAAGTTGAGCGGGGTGGGGGGAGGGGAG
CTCGTTGGGTCCTGACAGGGAGGGGCGTCAGACTTCGGCCTAGAG
GGTTTTCTTGGATCTGACTTCGAGGCGTTGCTGGGATCCGTTGAG
GGGAATGCCCCGGGGGGTGTTTACCCAGGCCGAACTGGGGGAGGC
TGCAAGGATCGGACCAGGGGGTTACTGACACGAGGTGGTGGGGGG
CTCGGCCGAACTTGACTGGGAGAGGCAACAGAGATCCGTCAGCAG
GGGTTACTGCTGACAGGGTCGGAGGGAATTTCAGGGAGAGGCTTG
GCCAGACCTGATTGGGGAAGGCGACTGGGATCGGTCCAGGGGGCT
CCTATAGTGGGTTGGCCGGGCTTGGCTGGCTCTCATTCGAAGAGG
CAGCAGAGACCTACCTGGGGACTGCTTTGGGCCTGATTAAGGGGA
ATCC

[0485] In some embodiments, the intronic domain that promotes trans-splicing primarily in the brain comprises or consists of sequences from the gene TNPO2. In some embodiments, the sequences from gene TNPO2 comprise or consist of:

(SEQ ID NO: 432)
GAGGACCGGCTGGCTAGAGAGGCCAAAGAAACGGCAACTCTTTGG
TCACGTGACCGGACCTTGTCTCAGCCCGGGTTTCCCAAGTGCCAG
GGCACGTGTGAAGGTTGAACCTTCCGATTGGCTCGGCGGGACCAG
TTTGAACGGAGTACGGGAGCCGCGGCGGCTCACCTACGGCCGCGT
TTTTCTTTTTTTTTTTTCTTTCTTTCTTTTTTTTTTTTTTTTTTT
TTTTTAATTCTCTCTCTTTGGCTCCCTCCTTCCGCGCGAGTCTCT
GGAGAAGCCGCAGCGCGAGTTGCCGCCGCTGCTGCCCGGGGCCGG
GTAAGTGGGCCTCACTCAGAGCCCGACCCTCTTGGCCCCGGCTTG
CGTCGACCCCCGCCGGGCACCGAGCCTGCGCCGCGCGCGGCCCGG
GCGTCGGGGCCGCGCCCGACCGGGAAAGGCCGGGAAGCCGGTTGG
GCCCGATCCTCCTGGCAGCTAGAACGGGCCGGGCGGGGGAGGGGG
GAAC

[0486] In some embodiments, the intronic domain that promotes trans-splicing primarily in the brain comprises or consists of sequences from the gene NFIX. In some embodiments, the sequences from gene NFIX comprise or consist of:

(SEQ ID NO: 433)
TTATTATTTAAACTTCAAACAAGCAAACAACCAAAAAAAAAAAAA
AAAACCAAACAAAACCGAGAGAGCCCATCCTTCTGTCACCTGACT
GAGTGGGAAAAAGGGTGAAGGGGTTGTGGGAGGCTGGGGAAGGGG
TCGCAAGAAGACCCATGTAGCTTTTAACCCTAATGTGGCCGAGAC
AAGCACCTTATTTGTGCTAACAAGAAGTGTTTTGTTCATTATTAC
TGTGATTAACATTAGTATTGGTGTCGATAACAAAGCTGAAATCAC
ATATTTAGGATTTAGGTCTGATTAAAAAATGTTGGGGTGGATGTT
CCAACTGGATCAGGAGAAAAGAAAATGAAAACAGCCTGGGGAGAG
GGAAGCCTGATCTGTTTCCTCACTCGCTTGCTCGTGGATGTCATT
TTCTGTCTTCTTGGGGGCGGCCAAAAATCGACCGGTGTCGGGGAC
CAGAGGCGGCCCCGCACGCCCCCGCGTGTGCGTCCACGGGCGTCT
GTGC

[0487] In some embodiments, the intronic domain that promotes trans-splicing primarily in the brain comprises or consists of sequences from the gene NFIX. In some embodiments, the sequences from gene NFIX comprise or consist of:

(SEQ ID NO: 434)
TGTGTGGACGGCAACGTTGTCTGTGCGCGTGTGTGTGAGTGAGTG
AGGGAGAGAGAGAGAGAATAGGTGTGTGTAGAGGCTCCCGGTGCC
TCTGTCTGGCTGCTGAGGCTGAGATGGGAGCAAGTGGCTGGCGAA
GCTGGTGGTGGCTTCAAACCACACTTTCGTAGAACAATCGCAAGA
GAAAATTGTTGGGGGGAGGGAGGAGGAGGAGAAGGCGGTTTTCCT
TGTGCCCCCCCTTCTAACGCTGCTTTTCTCCTTCTCTCTTTCCCC
CTCATCCCGTCTTCCCCTCCTCCCGTCCTCCCTCGCCCCGCATGC
TCCCGGCTTGCCGCCTGCAGGATGAGTTCCACCCGTTCATCGAGG
CACTGCTGCCTCACGTCCGCGCTTTCTCCTACACCTGGTTCAACC
TGCAGGCGCGGAAGCGCAAGTACTTCAAGAAGCATGAAAAGCGGA
TGTCGAAGGACGAGGAGCGGGCGGTGAAGGACGAGCTGCTGGGCG
AGAA

[0488] In some embodiments, the intronic domain that promotes trans-splicing primarily in the brain comprises or consists of sequences from the gene RHPN2. In some embodiments, the sequences from gene RHPN2 comprise or consist of:

(SEQ ID NO: 435)
GTAAGTGGGAGCAGCACACCTTCCAAAAGCCTCTGAGCCAGAGAT
CCTTCGTACATCCAGGGTGCTGCACAAAGAGGTCAGATAGCGTTC
TAGACTGGGGTGTGGCAGCCCCCACTTTCGGAAGTGAGAGAACCA
TCAGGTTTGGGGTTGAGTGAGGTGCTAGACTGGAAGGGATGAGCC
CATTTGTTGGGAAATACCTGCAGTGTTGGACAAAAAGGCATTTGT
GAGGCCGGGCACGGTGGCTCACTCCCGTAATCCCAACACTTTGGG
AGGCTGAGGCGGGTGGATCACCTGAGGTCAGTCTGGCCAACATGG
TGAAACCCCGTCTCTGCTAAAAATAAAAAAAAAAATAGCCAGGCG
TGGTGGTGCACACTTGTAATCCTGGCTTCTCAGAGGCTGAGGCAG
AATTGCTTGAACCCGGGAGTTGGACGTTTCAGTGAGCCGAGATCA
CACTACTGTACTCCAGCCCGGCTGACAGAGCAAGACTCTGTCTCA
AAAC

[0489] In some embodiments, the intronic domain that promotes trans-splicing primarily in the brain comprises or consists of sequences from the gene RHPN2. In some embodiments, the sequences from gene RHPN2 comprise or consist of:

(SEQ ID NO: 436)
ATGCACCACCACACCCAGCTAGTTTTTGTATTTTTTAGTAGAGAC
AGAGTTTCACTATATGTTGGCCAGGCTGGTCTCGAACTCCTGACC
TCAGCTGATCCACCTGCCTCGGCCTCCCAGAGTGCTGGGATTACA
GACGTAAGCCACCATGCCCGGCTGGAATCATTCATTTCTTTTCAA
GTGGGTATCTTATGGTATTTTAGGGCATGGCTGGGAGCAGTTTTG
TTTTCTCTTCTCAAGACTGAGTGTTTGCAGGATGTCATAGAGTTC
ATGTCTGCAGCTCACAGTGTCATTGCCTGTGTCCCCAGCTCCACG
TACTGGCAGGTGTGCTGCAAGCTGGGTAGGTGCCCTGTGTCCCTG
GGATACCTTAACCGACACTCCTGGCCCTCCTCTGCAAGCTGTGCC
CTGATCCTCCCTGCAGGGACTGGGGATTGGGTCTGCTCACCTAGA
AGCCAGGATACCTGGCTGAGGGCACTTCTCTCCCTCTTCTCTTTG
AACA

[0490] In some embodiments, the intronic domain that promotes trans-splicing primarily in the brain comprises or consists of sequences from the gene SCN1B. In some embodiments, the sequences from gene SCN1B comprise or consist of:

(SEQ ID NO: 437)
AGATGGGGCTTGGGAGGATGACTGAGGAACGTGTGTGTGCTCGTG
TGCATCTTGGCTAGAGGCAAAAGCGGGGTCTGGTTGACTCCAGGC
GTGATCCTAGCCCCCCACCCCTGTGCCCTCCCTGCCTGAGGTCAA
GGTGTCTGAGCCCATCTGTGTGCCATCTGTGTTTGTGGGTGTCAG
GGCAGGGGACAGAATCAGGGTCAGGTAAGGGAAGAGAGGCCCAGG
CAGTGACACCTTCCCCTCCCTGGCTACCCCTAGATCCTGCGCTAT
GAGAATGAGGTGTTGCAGCTGGAGGAGGATGAGCGCTTCGAGGGC
CGCGTGGTGTGGAATGGCAGCCGGGGCACCAAAGACCTGCAGGAT
CTGTCTATCTTCATCACCAATGTCACCTACAACCACTCGGGCGAC
TACGAGTGCCACGTCTACCGCCTGCTCTTCTTCGAAAACTACGAG
CACAACACCAGCGTCGTCAAGAAGATCCACATTGAGGTAGTGGAC
AAAG

[0491] In some embodiments, the intronic domain that promotes trans-splicing primarily in the brain comprises or consists of sequences from the gene SCN1B. In some embodiments, the sequences from gene SCN1B comprise or consist of:

(SEQ ID NO: 438)
CCGCACACCCCTCTGCACTCCTGCCCCGGGGGAGCCGCGCTGGCC
TGCAGTCTCACTCAACACCTCTGGGGCGGGCCTAGGGGTCCTTTC
TAAAGCTCTCAGGTGAGGCAGTGAAGGGCCACAGGTGCGGGGCCC
ACCCTCTGAGCAGCAAGGGCCTACAGCGCTTTTGAACGTCTCATC
ATTTTGCCTCAGCCACCCTGGACCCCTTTTCTGAGGGAGGTCCGC
CCCTTCTCTGATCCATCTTCTGCTCAGCATCAATTGCAATTGTCC
AGCGCCCTGTGGCCACTGGCTTAGAGTTGGGGAAACAGCCCAGGC
CTTGAAGCAGCTACAAGCCGTGGCAGAAAGGTCTCTCAGGGCCAC
GGCACACACATCCTCATGGGCAACACGCACTGCCCATCTTTTCTG
TGAGATGGGTGCCGGCCTCAGTGCCTTACACGGAGTCCCTTAGTG
AATCCTCTCCCCACCCTCTGGGGTAGGGGCTCTTCCTATCCCCAT
TTTA

[0492] In some embodiments, the intronic domain that promotes trans-splicing primarily in the brain comprises or consists of sequences from the gene SAMD4B. In some embodiments, the sequences from gene SAMD4B comprise or consist of:

(SEQ ID NO: 439)
TGTATGGAGTATGCAAGTCTCAAATATCTCCAGCCTGCACTCATT
CATTAATGCATGGAGGCACTATTCTAGGTACTGGAGACAGAGCAG
TGAATAAAACATTCAAGGTCCTGAAATTCATGGAATTTATATTCT
GATGGGGGGAGGAAACAAAAAAATCAGAGTGTGATTCATGCTGTG
AAGGAAATAAAACAGTGTGAAAGAGAGGGTGGGAGTGGCCACTGT
AGTAGACAGGGGGATCAGAAGAGGCCTCTTTTGGGAGGTGACAGT
TGAGCCTGATAACCAGAAAGATGAGAAGGCACCAGTTGTGGGAAG
ATCTGGGAGTGGAACATTCTAATCTAAGCATTGTTACATGCAGAA
AAAGGACCTCTGCAAGGTGGGGAAATTTATCACAGATATTTATTG
AGGGCCTGCTATGTACCAGGTGCTATGCTAGGAATTGGAGATGTA
GCAATGAATAATATAGCTACAGTCTTCCCTTCTCTCATGGATCTT
ACAG

[0493] In some embodiments, the intronic domain that promotes trans-splicing primarily in the brain comprises or consists of sequences from the gene SAMD4B. In some embodiments, the sequences from gene SAMD4B comprise or consist of:

(SEQ ID NO: 440)
TGAGCCCAGATCTGATTGATGAGAAGGAACCAACCTTGTGACGGT
CCGGGGAAGAGCATTTCAGGCAGAGAGGTCAGCAGGTGCAAAAGC
CCTGCCATATGTTCAGGGAATCGCAAGGACCAGTGTGGCTAAAGC
CTAAGTGAGGGAGAGGGGTGAGGGTTGGAAAGGCTGACAGAAGCC
AGATTACTTGCAGCCTAAGGGCCACAGTAAGGAGTTTCTATTTTC
ATTTAAGGGGATTGGGAAACTATTAGAAGGGAGTTTTTAAAAGCA
AGACAGCGACATGATCTGATTAATTTTTTTAGAAAGCTCACTTTG
GTTTCTGGGAGGAAAACAGAGGGTCAGGACAGAATCAGGAAGGAA
AGTTAGGAGACAATCCATTTGTCCAGATGAGAAATGGTGACATGA
ATGTGGTGGTGGTGGTGGTAGTGAAGATGTAGAGAAGCAGATATA
TTTTGGGTGTACAGAAAACAGGACTTGATGATGGGATTAGAGAAA
GAGA

[0494] In some embodiments, the intronic domain that promotes trans-splicing primarily in the brain comprises or consists of sequences from the gene PAF1. In some embodiments, the sequences from gene PAF1 comprise or consist of:

(SEQ ID NO: 441)
GTATGTAGTAGGCTATACTATGTACGTTTGTGTAAGAGTACTGTA
TGATGTTCACATGATGTATATCTCAGAATGTGTCCCTGTTAAATG
GCCCATGCCCGTATTTATGTAAATACACCGTATAACACACACACA
CAGTGTAGGGCAACCAAACTGGTGCCATGGGAGCCATCCTTCCTT
TCCCCTGCCCTCAATACCTTGAGCTTAGCTGCCCTTATTCAATCT
GTATTTATTCCCATTTACTCTAAGTATTGATGGGGAACCAAGTCA
GACCAGACCCCTCACTGGGGGGCGGGGAAGTGGGAGGTGTGTCTT
TAACTGCATCTTCCACTTCTCTCTCCCAAATTCACCCCCTGCAGG
GTCCGCCTTAGTAAGCGCCGGGCCAAGGCTGGGGTTCAGTCAGGC
ACCAACGCCCTGCTTGTGGTCAAACATCGGGACATGAATGAGAAG
GAACTGGAAGCTCAGGTAACAAGCACCACTGGCTCAGGGCACCCA
TGGC

[0495] In some embodiments, the intronic domain that promotes trans-splicing primarily in the brain comprises or consists of sequences from the gene PAF1. In some embodiments, the sequences from gene PAF1 comprise or consist of:

(SEQ ID NO: 442)
ATGAATGTTTTAAATGAAATGCTTAAACCCATGTTCAAAAATGTG
ACTCCAAAACTCTTCCCTTATGGCTCAAAGTTTACTGCTATGCCA
GCACCTCTGGTGTAGAGTTGGGAAGTCTTGAGTTTCTGTTTAAAG
CAGAGATTACAAGAACTGTGACCCCATAGGCCAGGCAGGAAATGT
AAAAGAGCAGTGGCTGGTAGCATCTGAGTGACCTGGAGTTCTGGG
CAACCATGGAGGGCACTATTCACTTCCAGCCCACTGTTGCTGTGC
TGTGGGGCCAGAAATTCCTATCTTCCAAAAGCCCCAAATCCAAAT
GATTTGACATCTCCTGGTTTCTCAAAGTGTTGGTAACTAACTGAC
ACATACAGTAATGCACTGCATGTTTCAGTCAACAATGGACTGCTT
ATGGTGGTCCCTTAAGATAGAATACCGTATCTTTACTATACCTTT
TCTATGTTTAGATACACAAATACTTACTATTGTATTACAATTGCC
TGCA

[0496] In some embodiments, the intronic domain that promotes trans-splicing primarily in the brain comprises or consists of sequences from the gene CLPTM1. In some embodiments, the sequences from gene CLPTM1 comprise or consist of:

(SEQ ID NO: 443)
GGCTCAAACATAGATGTCACTTGTCACCAGCCTGGCCAACACGGT
GAAACTCCGTCTCTACTTACAAAAAAAAAAAAAAAATGGGAGGCT
GACGCAGGAGAATTGCTTGAATCCGGGAGGCAGAGGTTGCAGTGA
GCCGAGATCGCGCCACTGCACTCCAGCCTGGGTGACAGAGCGAGA
CTCCGTCTCAAAAAAAAAAAAAAAATTAGCCAGGAGTGGTGGCGT
GCTCCTGTAATCCCAGCTACTCGGGAGGCCGAGGATGCAGTGAGC
CGAGGTTGCAGTGAGCCGAGATCGCGCCATTGCACTCCAGCCTGG
GGGAGAGTGAGGCTCCGTCTAAAAAAGAAAAAAAAAGAGAGAGAG
AGACGTCACTTGTCCAGGATATCTTATCCAGTCAGTAGCACCACA
AGGGTTAGAACCCTGGCCAGACATCCACCCAATTTCACGGGTGAA
CAGTTAACAGCCTCTGAGAGTCTTGTCCTCTCTGGGCCTCCGTAA
CACC

[0497] In some embodiments, the intronic domain that promotes trans-splicing primarily in the brain comprises or consists of sequences from the gene CLPTM1. In some embodiments, the sequences from gene CLPTM1 comprise or consist of:

(SEQ ID NO: 444)
TTTGGACCACTGAGGGAACGCGCATGCGTGCTAGGCAGGGCAGTC
CGAAGGCTTGGGGGTGTATCATAGGGTCTCATCGGAGGTTTGTTG
GCCGTAAGACCCCTGGAATTGGAACTCTAAAAACACAGAAAGGAT
ATGAGCTCAGGAGACTTGAACGAAAGAGTTGTCTTAGGAAGAGGG
GTCAGAAGACAAGGGTGCTGGGCAAAAGGCTAGTTCTTCGAATCA
GAATACGGTGGCCAGAAAGGTTCCTCTGACGAAAGAGGGGCGTGG
TTCGAAGCCGTACAGTGGCCGGTAAAGCTCAAGAAACATGGAACG
AAAAGGACGCGAAGAATCGGCAGGGAGAAGCGGACAGGATGTCCC
GAAAGGCTCATATAACCGAAAAGGCGGGTTAATGTGAAGGGACGG
AAGGGACAGAACTTGCGGGAGGCACATGCTGGCCGAGAAAGTCCT
GGAGTTCGGAGCATACAGTGTTTTTATTAGGTGGAAACAAACGGG
CTGG

[0498] In some embodiments, the intronic domain that promotes trans-splicing primarily in the brain comprises or consists of sequences from the gene SLC1A5. In some embodiments, the sequences from gene SLC1A5 comprise or consist of:

(SEQ ID NO: 445)
GTATCTAATAACCCTCTGTGTGTCTGTCTCTGCAGAAATATCTTC
CCTTCCAACCTGGTGTCAGCAGCCTTTCGCTCAGTGAGTCCTCAG
GGGTGTCCTGAGGGGATGGGGGTGGACAGGGAGGGATGCCAGCCA
GGGGGAGCCCTTGCTACCTGATTTTGGTTAGTTCCTGGAAAAATG
CATGTCAATGAGAATACGGGCTCAGAGCCTCCTGTGAGTTTTAAT
TCTAGCTGTGTGACTCTGGGTAAATGTGTTTACCTCTCTGAGCCT
CGGTTTTCCACCTCTGGAAAATGGGGGTATTGATCATCCTGCCCC
ATGGGGTTGCCAGCAGATGAAATGAGATCACATTGAAAGGATGTG
GAAGGGCAGGCTTTGAGCATTGTTAGCTTGGCATGGGGTTGGGAG
GCCCTGGTAACGATGGACACTGACTCTTCCCAACCCCACCTACAG
TACTCTACCACCTATGAAGAGAGGAATATCACCGGAACCAGGGTG
AAGG

[0499] In some embodiments, the intronic domain that promotes trans-splicing primarily in the brain comprises or consists of sequences from the gene SLC1A5. In some embodiments, the sequences from gene SLC1A5 comprise or consist of:

(SEQ ID NO: 446)
GAGAGAGTCTCACTCGGTCCCAGGCTGGAATGCAGTGGCTTGATC
TTGGTTCACTGCAGCCTCAACCTCCTCGGGCTTGAGTGATCCTCC
CACCTCAGCCTCCAGAGTAGCTGGAACTACAGGCACATGCCACCA
TGCCTGGCTAATTTTTGTATTTTTTGTAGAGACACGGTTTCGTCA
TGTTGCCCAGGTTGGTCTTCAACTCCTGGCTCAAGCGATCTGTCT
GCCTTGGCCTCCCAAAGTGCTGGGATTCCAGGCAAGAGCCATGGC
GCCTTGGCCTTAGCTACTATTTTCATCTTAAGGCAGACACTGTCA
CACAAGAGTAAGGGTAGCCTTGTAAACACAGATGCATATTCATGA
GATATGAAGCCGTCCCTTTTCTCCCTCCCCGCCACCGCCTCCCAA
CACACCCAGATCCTCCCCCATACTCTCAGAGCCGCTGGCAGGCCC
TCCAGGAGGAAGTGGCTGATGCAAGCTGTCCAGGGTATTAAGTTT
GCTG

[0500] In some embodiments, the intronic domain that promotes trans-splicing primarily in the brain comprises or consists of sequences from the gene RPL13A. In some embodiments, the sequences from gene RPL13A comprise or consist of:

(SEQ ID NO: 447)
GAGAGGCTGAGGCAGGAGGATCCCTTGAGCCCAGGAAGTGGAGGC
TGCGGTGAGCCATGATCGCCCCACAGCACTCTGGTGTGGACAACA
CAGCGAGACCCTGTCTCACAAAATAAAGTAAGCCCGGACTGAGTG
CGGAAAGGCGGGCCTGGCGGGTCTGGTCTCCCCATGCGGGCCACC
AGAGGCCCTGCAGCCTTCAGTCGCTTGAAGGGGTAATGGCGCTTC
CACTCACAAACATGGCGGACAGAGCGTGTGAACGAGATGAACAGC
CCCTCAAAAATATGGCCGCCGAGGCTGGACGGCCGTGCCCCAGCA
GCACCGCCTCCGCGCCCCACGTGATCTCTCGCCGGGCACAGCGCT
GACCGCGGAGGTCCAACCGGAAGAATGTCCGGATTGGACATTCGG
AAGAGGGCCCGCCTTCCCTGGGGAATCTCTGCGCACGCGCAGAAC
GCTTCGACCAATGAAAACACAGGAAGCCGTCCGCGCAACCGCGTT
GCGT

[0501] In some embodiments, the intronic domain that promotes trans-splicing primarily in the brain comprises or consists of sequences from the gene RPL13A. In some embodiments, the sequences from gene RPL13A comprise or consist of:

(SEQ ID NO: 448)
TTTTCCAAGCGGCTGCCGAAGATGGCGGAGGTGCAGGTATGGGCT
CCGCGCGGGCCGGGGCGGCAAGGGGCCGGGTGGGATCCAGGCCGG
AATGGGGTCGCACCCTCTCTGTCTTGCATGTTTTGCGGAGCTTAA
CATCCATAATGAAGCAAAATGGAAGTCTTTTGGGATAAGGGGAAT
CTGTAGGAAATGCCGCGGCTCTCTTTAGGCCTAGGGTTGGCTACA
ATGTGGCATTTCCTTCTCGAGGCGAGGGTGATAGAGCTTCCAGCA
CAGGACAGGTATTTTGCAACTAGATTTTGCTTACCTTGAACTCGG
GTAGTGGGTGGGGGCCCTGGGGTAGAGTCTTGGCCGAATTGGACC
CTTGTGTGTCCTCAGCGATGAGGAACACGCGGAAGTGTGGCCGGG
CGGTCTCGGGGCAATGAGAAACTGAGTTTTGGCCAAAATGGAAGG
TATTTTTATCCCGCTCAGTGCGCGGGCTACTTTGATTTCACGTGG
AGGT

[0502] In some embodiments, the intronic domain that promotes trans-splicing primarily in the brain comprises or consists of sequences from the gene NOSIP. In some embodiments, the sequences from gene NOSIP comprise or consist of:

(SEQ ID NO: 449)
GTATGCACCACCACGCCCAGCTAATTTTGTATTTTTAGTAGAGAT
GGGGTTTCTCCATGTTGGTCAGGCTGGTCTCGAATTCCCAACCTC
AGGTGATCCGCCCACCTCGGCCTCCCAAAGTGCTGGGATTACAGG
TGTGAGCCACCTCACCTGGCATTTTTTTTTTTTTCCCCAGAGACA
AGGTCTCACTCTGTCACTCAGTCTGGAGTGCAGTGGTGCAGTGGC
ACGATCATAACTCACTGCAGCCTCAACCTCCTGGGATCAAGTGAT
CCTCCTGCCTCAGCCTCCCAAGTAGCTGGGACCACAGGCGCATGC
CACTATGCCCGGCTAATTTTTTAAATTTTGTTTTGTGGAGATGGA
GTCTTGCTATGTTGCCCATAGCAAGTTCAAGTCTGGTCTCAAAAA
CCATGCTGCTGCTGCTTTTTTTTGGTAGAGACAGGGTTTTGGCAT
GTTGCTCAGGCTGGTCTTGAACTCGTGAGTTCAAGTGATCCTCCT
GCCT

[0503] In some embodiments, the intronic domain that promotes trans-splicing primarily in the brain comprises or consists of sequences from the gene NOSIP. In some embodiments, the sequences from gene NOSIP comprise or consist of:

(SEQ ID NO: 450)
GCCATGTTGGCCAGGATGGTCTCGATTTCTTGACCTCATGATCCG
CCCGCTTTGGCCTCCCAAAGTGCTGGGATTACAGGCATGAGCCAC
CGCGCCCCGCCTGCATGGATGTATGTTTTTATTTCTATTGGCAGT
GGAATTGCTGGGTCAAAAGGTGACTATTTAACCTTTTGAGAAACT
GTGACTTTTCCAGAATGGCTGTACCATTTTACATTTCTACCACCA
ATGTATAAGGGTTCCAGTTTCTCCATATCCACACCAGCACTTATT
ATTTATCTTTTTGATTATAGTCATTCTAGGGGGTGTGAACTGGTG
TCTTTTAACATGCTTATTGGCCATTTGTAGATCTTTGAAGAACTG
TCTATTCCAATCCTTTACCCATTTTCAAATTGTGTTAGGTGTCCT
TTCATTATTGAGTTGTAAGTTTTTAATATATTCTCACTGCAATTC
CCTTATCAGATATCCTGATTTTTTTTTTTTTTTTTTTTTTTTTGA
GACA

[0504] In some embodiments, the intronic domain that promotes trans-splicing primarily in the brain comprises or consists of sequences from the gene NUP62. In some embodiments, the sequences from gene NUP62 comprise or consist of:

(SEQ ID NO: 451)
AAACCCACCTTGTCCCATCCACATCAGGACATCCCAGCTGGAGTT
CAACCTTCATCCCTTCTGTGGCAGTTAGGAGACTGAATCAAGGTC
CAGAGAAGGTGGAGGAATCCTGATACTGAGCGGTACACACAAGCT
TCTTTCTCCTTCCTTACCTGTTGCGGGCAGGAAGTCCTTCTTGGG
ATCTGACCACCTTCCCTTAGAGCACTTACTGTCCACTCTGCCAGT
TTTTGAGCACTTGCCCTATATTTTCTTGGGCCTATAGGGGCTGTG
TTATCACTGAGGCAGTATACAGAGTAGCAGCTAAGAGCATAGACT
GAGCTTGTCCCACCCGTGGGCCTGCATGCGGCCTAGAACAGCTTT
GAATGCAGCCTAACACAAATTTGTAAACCTTACCAAAACATGCGA
ATTTTTTGCGATTTTTTTTTAAGTTCATCAGCTATCAATAGTGTA
TGTTATGTGTGGCCTAAGACAATTCTTCAATGTGGCCCCAGGAAG
CCAA

[0505] In some embodiments, the intronic domain that promotes trans-splicing primarily in the brain comprises or consists of sequences from the gene NUP62. In some embodiments, the sequences from gene NUP62 comprise or consist of:

(SEQ ID NO: 452)
AGACGGGGTTTCACTGTGTTAGCCAGGATGGTCTCAATTTCCTGG
CCTCGTGATCCGCCCGCCTCGGCCTCCCAAAGTGCTGGGATTACA
GGCGTGAGCCATCGCTCCCGGCCTCAGCATATTTTATTAATAGGA
ACTCTGGGGCCCAGTCTCATTTCTTCCTTACCACTTGTAAGAGCC
GCAGACGTTGGACTGTCCAACACCTGCTGTCATTCTTCTGTCTCC
CTCATCCCTCTAAAGTGTCTGTTTCCAGCTATCCTCATCTTCCAT
TCCAAATGATGGGTGCCCAGGCCCCATCCCCTGGCAGGGATTCAG
ACATCGAGGCCCCAGCTGCGTCCTTTTCTCCATCCCTTGCCCTTG
GCTTCCTTTCAAACCGTCCTTCAGCTTCCACTGGATAGGAACTAT
CTCCCAACCCTGCCAAAAATGGAAGATCTCCGTTTTCGTTTAGTC
ACAGGGTAGCCATCTTGCCCCTTCTCATGCACTGGGCCCTCCTCC
ACCA

[0506] In some embodiments, the intronic domain that promotes trans-splicing primarily in the brain comprises or consists of sequences from the gene ATF5. In some embodiments, the sequences from gene ATF5 comprise or consist of:

(SEQ ID NO: 453)
GGCCCCAGAGTTCCTATTAATAAAATATGCTGAGGCCGGGAGCGA
TGGCTCACGCCTGTAATCCCAGCACTTTGGGAGGCCGAGGCGGGC
GGATCACGAGGCCAGGAAATTGAGACCATCCTGGCTAACACAGTG
AAACCCCGTCTCTACTAAAAATACAAAAAATTAGCCGGGCGTGGT
GGCGGGCGCCTGTAGTCCCAGCTACTCGGGAGGCTGAGGCAGGAG
AATGGCGTGAACCTGGGAGGCGGAGTTTGCAGTGAGCCGAGATCG
CGCCACTGCACTCCAGCCTGGGCGACAGAGACGGAGAGACTCCGT
CTCAAAAAAAAAAAACAGTTGAACAGGAATGTATGAGTTGAGCTC
TGTGCATAAGGCTTGCCAGACATCGTCTTATTTGAGTCTCATAAA
CCCACCAGGCGAGTTGATTTTTCTTATTTTACAGATAGGGAAATG
AAGTAAGAGAACTTAAGTTATTTGCCCGAGGCCATCCTGGCAGGT
CTGT

[0507] In some embodiments, the intronic domain that promotes trans-splicing primarily in the brain comprises or consists of sequences from the gene ATF5. In some embodiments, the sequences from gene ATF5 comprise or consist of:

(SEQ ID NO: 454)
TCGGATCCCCAGCTGAGAGGGAGGAGGGTCCCGGACCCTAGGAGT
GGGAAGGAAAGGCTCGGATCCCCTGATCCCCAGGAGGAGGGGACC
CGGCTGCCTCCCGGTTGGGGCCGCGCGAGGGCGGGGCGCGGAAGG
ATCCGGGAGGGCCGTGCTCCGCCACCCAGTATATATCTGTCCCCA
GTCCCCGGGGCCGCCTCATTCCCTGTCCTCGGATCACAGTCTCTT
CTCACTACAGTGTCGCCGCCTCTGCCTGCGTAGCCCCGGCCATGG
CTCTGTAGCCTCGACCCCTTTGTGCCCCCGGCCCGTCTCCGCGCT
CACCACGCCTGCGCTCTCCGCTCCCACCTTCTTTCTTCAGCCGAG
GCCGCCGCCGCCTCTCCTTGCTGCAGCCATGGAGTGAGTAACCGC
TTACCTCTTCTCCAACTGCCTTTCCCGCCCTTTCGCAGCTCGTGG
CCCTCTTTAGGGAGCCCTGGGGGGTGGGGAGTCGCGAGCGGGGAA
TCAC

[0508] In some embodiments, the intronic domain that promotes trans-splicing primarily in the brain comprises or consists of sequences from the gene PTPRA. In some embodiments, the sequences from gene PTPRA comprise or consist of:

(SEQ ID NO: 455)
GTTTTCTTACTTTGTCAATTTCTAATTTTATTGCATTGGGACAAA
AGAATATTGTACTCTTTCTACTGTTGGGGTTTATAAGGGCTGTGG
ATATTTCACTCGCCTTTGAAAAGAAGGTTTTCTCTGTTAGTCTGT
AGAGTTTGGTATGTACCAATTAGATTTTATTACTTATCATTTTGG
TCTTTTGTATCCTTACTTAATTTTGTCCTCTTGAATTTTAATGGA
GCAAAAGACATAAAGTCCTCTAATAACATGCGTTCTGTTTGCATT
CTCATACTTTTTATGAATATTGATGCTGCACTATTTGTGTACCCA
GGGAGAAGGCCAGACCACTGTCCAAAGTTTAGTGAATCTGGGCAG
CCTTGTTTCCCAGTTGTTGGAGGATGCCTCATGGAGGAAAGCATT
CCTAATCCTGGAGCTTGTTTTGTTGTACTCTAATTGAATTGTAAT
GTGTTTCTTTAACCTGAATGAATGTTTCTATTTTTTACTTATTAC
ACAG

[0509] In some embodiments, the intronic domain that promotes trans-splicing primarily in the brain comprises or consists of sequences from the gene PTPRA. In some embodiments, the sequences from gene PTPRA comprise or consist of:

(SEQ ID NO: 456)
TGAGCTGCTCACCTTATATCTGTTGTTCCTTTTACACAGTGTACA
GTATTCATTTATTTCCTCTGCTCACAGTCTGTGGTAACCGTGTGC
ATCTGTGGCTGTGTTGTTTGTTTACTTTCCCTTAAGTTATTTCCA
TGTTAATCTCATGGAGAAGAGCAATAGAAACAAGTACTGTATTCA
GTATGTTTTTTAATATAGACTATGGATTCTAACAGCTATGATGTA
TTTTAACAAGTAACAAAATATATCTTACTTTGACATGTCACTTTG
TTAACATTACTTTTTGGTGATATTAGGTCATAATTTCTATACCAT
TAGTTACTTCTGATTTCTAGGCCACAGTTCCCTTTAAATATTCTT
TGTGTTGTTTTTCCCCTAGTGTATAAAATGTCAACCCTTTGTGGC
TTTATATGGATTTTATGGATTTTCAGCCCTTAAATGTAAAGTCTC
TATGGCCTGAGATGTTGTGTCTGTGGTTTAAGCTGGACTGCTGAG
TCCC

[0510] In some embodiments, the intronic domain that promotes trans-splicing primarily in the brain comprises or consists of sequences from the gene TPX2. In some embodiments, the sequences from gene TPX2 comprise or consist of:

(SEQ ID NO: 457)
AAAGAACAGACCTTCTTAATTCGAATCCCATCTTCTCCATTTATT
ATGTGATTTTGGACATGTTTGTTCAACTTCTCCTAGACTTTGTTT
TCTTTTTACGACATGGGGATCATAAAGCCGGGATGCAGTTGGGAA
TAAAACCGGATAAAGCTCCCAACGAACCGCGGGTTTCATAAGATC
AGGGCAGGGACTGGGTAAAAGGTTTCAAAGACTCCTGCACTATTG
GGAAGGACGCTACGGGCGAGTCTATGTTGCATGCAGGCGACTCCA
TGTTAAGACGAAGTGAACTCCCTGAACCTTCAAGGGATAATGCAC
AACCATAACGAGAATAATTTTTAAAAATAGAGTTTTCTTCCCTGA
AAACTTGGAGAGGTCCAGGATGCGCGCCATTCTGTGATCTAGGTT
GACTCTCCACCTCTTCAGTTGGTACCACCTTTCCCAAATAGTTTG
GAGCAGAGCACTCCGGTCTTTGTAATAACGTACTCCTAAGAGCTG
TTCC

[0511] In some embodiments, the intronic domain that promotes trans-splicing primarily in the brain comprises or consists of sequences from the gene TPX2. In some embodiments, the sequences from gene TPX2 comprise or consist of:

(SEQ ID NO: 458)
TAACGATAATTATTGTTATTACCATGCTAACAGGTTATAAACATT
GACTGAACTAAGCACCCTGCATGCCCGTTCTCATTTAATTTCCTC
GCCAAGCCAATGTAGTTGGTGCTATTCTTGGTCCCTCTTGACAGA
AACTGAGGAAGGAGGAAGGAGGAGGAAACTGAGGCCCAGAATCTA
GATAAATTTCGAGAAATGGGTGATACAGTAGCCATGCCCTCAGGA
AGTGTGGCGTTTGATGGAGGAAAACAGAGGTAGTCACAAATAAGT
ACATTTCAAAACTGTTGTCTAAAACAGGAAGATAATTAGATGGTG
TGAGAACATAATTGAGGGAGAGTTTAAGTCCACTTGGAGTTGTCT
TCTATTTGGGATTTAAAATTCATTATATGTTATCCATATTTGTCC
AGCTCTCTTTTTGTATGGAATCACCAGATATTATTCCCTTTCTCA
TTTCCTTTCTCAACATTTATAGATTGGAGGGGGGAAGGAAAACCA
AACC

[0512] In some embodiments, the intronic domain that promotes trans-splicing primarily in the brain comprises or consists of sequences from the gene CBFA2T2. In some embodiments, the sequences from gene CBFA2T2 comprise or consist of:

(SEQ ID NO: 459)
CAAGTCTGGATCTGAGAGGCAGCTTGTGTGAATCATTTACATACA
TTTCTGTTTATATTCCCCAAATTAATTTGCAACTTTATATTTTTC
ATCCAATTATATGTTCAAAACATATTTTTAATAATTGATTTTAAG
AAGGAATTTGTTATATTAGGATTTAAAAACTGGCTCAAAAAACAG
AAGCTATTAAACAATAGCAGAAACCAGACAGTATATAGGACTTTA
AATGGTAATTGCTAAACATTTGAATGTTCCCAAAAATGTGAGTCT
GTGTGTCTCTGTGTGTCTCTACGTGTTATTCCACTAGGGATTTGC
ACAGATAGGTTTTGCACAATATCCTTGCTGTTATTGTCAGCCATA
AACAAATTACACGTATTTAACAAGTTAATGTCAGATTGGCCAGGA
GCCACTGGGAGGTGTGTACTTAGTGACATCAGCTGGCAAAGAGCC
CTGGTAACAGGGAGGGTTGGAAGGGTAGTGGAGAGAGAGGAAGCA
GGAG

[0513] In some embodiments, the intronic domain that promotes trans-splicing primarily in the brain comprises or consists of sequences from the gene CBFA2T2. In some embodiments, the sequences from gene CBFA2T2 comprise or consist of:

(SEQ ID NO: 460)
TAAGTACATTTTAATATAGTTTTGGGGGTTAAAGTGCACAATTCT
CTGCCTTTCAAAGCTTTTTACTTCTTTCAAATTACGATGATATGA
ATGTTTCTTGGTATTTGATACAAGAGTTCAGCCTTTCTACTCAGT
TTTATTTTAATGCTTCATTTTATTTATGTTTCTATTTTTCTGTTG
CCAACCTTATATTTGAATGTCATGCTTTTTTGAATGCAAGGTTTA
CTTAATAATTAGATGTAGTATATGAATTCTACAGCTAGAAAAGTA
GTCCCACAAATATTTCTGTAAGGTTTTCCACGTTGGATTGTTCTG
TGATGTTTAGAGGGAATTTTTTTCCCCTTTAGTATGCATAATACA
AATAGGCCATATTAAAAAGATGGCTCATAAAACGCTCTTTTCTAT
TGTCAGATTTTATTTCAGTATATGCAGGCAAATTATAACTAAAAG
AGGTTGAAGCAAAACTAACAGCATCTCTTCGTTTTAGATATATCT
AACA

[0514] In some embodiments, the intronic domain that promotes trans-splicing primarily in the brain comprises or consists of sequences from the gene DYNLRB1. In some embodiments, the sequences from gene DYNLRB1 comprise or consist of:

(SEQ ID NO: 461)
AGCAGAGTTCTCGCAATTCCTACTTAAGCAGAATGAAAGCCATCA
AGGGCAACAAAGTGGAGGTGCTGTGTCCTTGGATAGAATGTTGAT
TTCCAGCCAGGCGTGGTGGCTCACGCCTGTAATCTCAGCCCTTTG
GGAGGCCGAGGCGGGCGTATCACCTGAGGTCAGGAGTTCGAGACC
AGCCTGGCCAACATGGTGAAACCTTGTCTCTACTAAAAATACAAA
AATTAGCCTGGTGTGGTGGCGGGCACCTGTAATCCCAGCTATTCG
GGAGGCTGAGGCAGGAGAATCGCTTGAACCAAGGAGGCAGAGGTT
GCAATGAGCCGAGATCACACCACTGCACTCCAGCCTGGACGACAA
GAATGAAACTCGGTCTCAAAAAAAAAAAAAAAATGTTGATTTCCA
AGTCAGCAGAGCCCTGGCAAGCACAGAGCTAGACAGAACGTGCTC
CCCAGCCCTGTCTAGTTCTGATTAAACCATGTGGTCATTTCATTT
ACAG

[0515] In some embodiments, the intronic domain that promotes trans-splicing primarily in the brain comprises or consists of sequences from the gene DYNLRB1. In some embodiments, the sequences from gene DYNLRB1 comprise or consist of:

(SEQ ID NO: 462)
TGAGTGCTGCTTTTTTGTATACTCATGGGGCTGATTGCACCATAG
CTGAGAACGTGGAATGCAGAATGAGCCCACCTGGCTTTGAATCTG
GGCCCTACTTAACTTATCAGCTATGTGGTTTTGGGCATAAGCCAC
TTTCTCTGTTAAGTTTTCTCATTTGTAAAATGTGGGTCATAATTC
TGCCTTCCTCTAGGGGAAGCTTTTAGAATAGTGCCTGGCATGAAA
TGCCTATGAATGTCTCAGTTAGTGTGTGTGTGTCTTTAACTTGCG
TCCCATTCTCAGGGCCCCCACATCAGTGTCTCGTTTACATCTCAC
ACAGTGACCCTGCGAGGCAAGGGTTTGCCCAGTTTGCAGATGAGA
AACCCAAAGCTGAGAGAGGTGTGGGGAACCGCCCAAGGTCACCCA
GCTGTGAATGAACGTGGTCAGAACACAGAATCTGAGTTGGTCACA
CTTCCCACTGATCCATGGGGCCTTTAAGCCCTCTGGAAGCTTCCA
TTAA

[0516] In some embodiments, the intronic domain that promotes trans-splicing primarily in the brain comprises or consists of sequences from the gene ERGIC3. In some embodiments, the sequences from gene ERGIC3 comprise or consist of:

(SEQ ID NO: 463)
CGGGGGTGCTCTGTATTTGGAAGGATGTATAAATGCAAAGGTACA
GTTGCCCAAGGCCAGAGATCTGGCTGAATTGAGGCCTGGGAGTGA
GTTTCTAACATCCTTGTTGATTGGGGCTGGGGTGGGTAATAATCT
CTTACAGTGTAAAGTTTACAAGTATTTTTCCATCTTAGATCCCAC
GTGATCCTTAGGACAGCCCTTTGCAAAGGAGAACACTGAGGCCCA
GAAAGGGCAACTGATTTGCCCAAGGCCACACAGTCAGGAACTTGG
CTCTTTGAGCTCTAGGCCTCTTGTCCTTCTAGGCCACTATTTTGC
TCCTCTCTGGCCAGATTAGTTCACTCTCGAGGAGGGGCCCAGAAG
GAGGCTTGTTAGCTGGGGCCAGACTGTGTTGCTGAGGCTGAATGT
TCCAGTCTTCCCTCCTGCAACATATCTTGCTCTCATAGTTCTCAT
TGTGAAGCTCTGAATCTTTCTTCTCTCTCCTCCCTCCCCCATGCT
GCAG

[0517] In some embodiments, the intronic domain that promotes trans-splicing primarily in the brain comprises or consists of sequences from the gene ERGIC3. In some embodiments, the sequences from gene ERGIC3 comprise or consist of:

(SEQ ID NO: 464)
TAAGTGGCCCTGCCCCCATGGAGGCCAAACCCCTACTTCTGGGGC
AGCCTGCCCTACTAGAATGGCGGGGAGGTTGGATGGGGCTGTGAT
TGGGTCTCCTCTGACCTGGCTGCTGGGTGACTGTAAAAGGTCTGG
GATGTATCTTTGAAGTATGGTTCCTTGCAGCAGGAGGGATTGAGG
CTAGAGGGCAGGAATAAATTGTTCTGGAACAGTTGGTACAGGGTC
CCCATGGGATTTCTTCTGGGGAGCTTTGAGGGTGGAGGCAGGGAA
AGTGTGGATGGCATTCTCAGATCCCACCTCACTTTGAGGTTCAGT
GATTTGCCATCAGCTCTAGTTAGTGAGAGCCCATAGTCGGTGGGT
TTTGTTTCTGGAGATGCAGGCAGGGCCATGGTGGTAGTCAAGGCA
TAGAGTTCCCTGTGGACGTCAGGGAGGAACCAGGGTCTGTTCTAA
AGACTCCTGAGGAGGGCGTGAACTCTCACACAGGCCCAAGGCTTG
CCCT

[0518] In some embodiments, the intronic domain that promotes trans-splicing primarily in the brain comprises or consists of sequences from the gene DLGAP4. In some embodiments, the sequences from gene DLGAP4 comprise or consist of:

(SEQ ID NO: 465)
GGCACCCATTCCTAGAGGCAGGAGCCCCAAGTTCTCGGGGGTGGG
GTGGTTCCTGACTGGCGCGGTGTGACCCGGGCCAGTCTCGTTCTC
TCTGGGCCTCAGTTTCCCTCCTCCACGGGGCGGCGATGGTCAACA
CAGGTTCCTGCCGGCCCGCCCCGTAGCCTGGGGTTCCAGGCTCCC
GTGCCACCGCGGCCCGCGCTGTGTGACCTTGTTCCAGTAGCCTGC
CCTCTCTGGACTGGCGGCCCCGGATTTCCAAGCGCTCTTCCGGAT
CGCGACAGAGCGGTCGCCCGCTGCGGAGACCCTCCCCCTTCCCCC
GGGTTGCGGGGGCGTGGGTGGGGGTGGGGCGCCAGGAACGGCGCG
GGCCCCCCCAAGGCCCCCCCAGCCCCGCGCCCGCGGCCCGATCCG
CGCCTGGTTTTGGGCGCAGCCGCACGGCCCCCTCCCCCGCGCTCC
TCTCCCCTCTCCCCGCCCCCTCCCCGCCGCTCTCGGGGAGCCGGG
GCCG

[0519] In some embodiments, the intronic domain that promotes trans-splicing primarily in the brain comprises or consists of sequences from the gene DLGAP4. In some embodiments, the sequences from gene DLGAP4 comprise or consist of:

(SEQ ID NO: 466)
TGAGGGCGCGGGGGTGGCGCGCGGCGGCTCCTACCCCCTTCCCGG
GCCGGCGCGCTCCGTCCCTCGGCTAGACCCCCCGATCTGGTCTCC
TCCCCGACAGACCTCCCTGAACCGGGGGACGGCGCTGGCGCAGAA
AAGCCCCCTCCCCTGCCAGTTCTGTCTTCCGATCCCGGGTCCGAG
GGGCCGGCTGTGCGGCTGGGAAGCGCCTTCTCCGGTTGGGATCGC
CCCATCCATGTCTCCCCGGACCCTCAAATCGGGGGCGGCGGCACC
GGGGCCCGGAACCCCTGTCCGGGACCGGATCCCCATTCCGGCTCT
TTTTCCCGCGGACTCCCCCGTACCCCATATCAAGCGGCTGCCAAA
GCCTGGAAGCCCCCTCCTCAGGCCCGCCCCCTAATCCGCAGGGCG
GCCTGGGGGTCAGGCGGACCCCTCCCGTGCCCGGCCAACCTTGGC
GCTTGGGAGAGCAGGGCTATGCCGGCCCGGGCATTCCTCCATTCA
ACCC

[0520] In some embodiments, the intronic domain that promotes trans-splicing primarily in the brain comprises or consists of sequences from the gene SOGA1. In some embodiments, the sequences from gene SOGA1 comprise or consist of:

(SEQ ID NO: 467)
GTGAGGCCCACCCCTGCCAAGCCGCTTCCACCCGCAAGGGAGAGT
TGCTACAGAAATGATTCAGAAGCAGGAACTCCTTCAGGTATAGCT
GGATCTAGGTGCTCATCCAGTGAGGTCTGGCACACCATCTCCTTC
AGGTATAGCTGGATCCAGGCACTTAGAGAATGCAGTGGGAACTAG
ATTTTTCTTTCTGCTTCAGCCTGTCAGGCCTGCTTTCCTCTGTGT
TAGCTTTACTCTTAAACAAGCTATTCCCAAATATGGCCACTGTTA
GTTTCATGCTCATATCTTACAGCTTAGCAAGTACAGTGGATTGGC
CAGATATGAGTCATGTGCCCACCCCTGGAGCCTACCCAAACCCAG
GAACCAAGAGGGAGGAACTAAGAGTGGTTCCCATGGGAAAATTGG
GAGGCCTCCAATCAAAAGAAGGAGGAAAGGAAAAGCAATCATTGA
CCCTCACTCCCCATTATAGTTCACTTCATGCAGCCAGGCACCACC
TACC

[0521] In some embodiments, the intronic domain that promotes trans-splicing primarily in the brain comprises or consists of sequences from the gene SOGA1. In some embodiments, the sequences from gene SOGA1 comprise or consist of:

(SEQ ID NO: 468)
CCTAACCCTCTTCCAGATCTCACAGCTCCCTCCATCTGCATATTC
CACGGTGTCCCCTGCACCTGCTGCCCCCAAAGACCTGGGCATTTC
AGGTGCTCCTCCCACCAAGAACCTGACCAGCTCATGGGGGTTAAT
GGGGGGCATTGAGTCTAAAGGTTGCACATTCCCTTTCCTGCCACT
CTGAGGTTTGAGGCCAAGAAAACCATCTTGCTGGAATGACCACTA
GTAATCTTTCTGAGTTTTTATGAGGATACTGACATCATGCCTGAA
AAGCCCACAGAAGAGCATGGCTTATAGAAAGAGCTCTTCAAACCC
TTATTGTGTGGAGGGGTTAGGGGTTAGTTCTGAGTGGGGAGGACT
AAGCTGGGTTAGTCCCTAGTGAGGGGTCTTCTGAGGGGACCTCTC
CCCTTTTCCCCGCTGGCACCCAGGAGGGAAGGAGAGAGAAGGGCC
AAGAGGAGTGGCCTCCTGCTGCCAGCTGCTTAGTCTGCTTCTTTC
CGCA

[0522] In some embodiments, the intronic domain that promotes trans-splicing primarily in the brain comprises or consists of sequences from the gene DBNDD2. In some embodiments, the sequences from gene DBNDD2 comprise or consist of:

(SEQ ID NO: 469)
CCTTAGGGGCAGAGCCTAGTCTGGAAGTCAGGCCTGTGACTTCAG
AGCAAGGGTTTGGGGTAGATGGCACATGCGTGTGTACGTGTTTGT
GTGGGTGGAGAGAAAAGGAGGGGCGCGGGAGGAGTTGCTTTAGCC
TTTGTCTGGGTTTTGAAGGATGGGAAGGGGTGGGCTGCAGCACTG
GAGGAAGGGAACCCTCCACCCTGAGATCTCTGTCTCTATCCTATC
CTGTCCCTGGCCTTCTGAGGCAAGCGGGGCCAATTAAGGGGAAAA
CGTACCTCCTCCATTTGTGCTGAACCAATCCCTCCAACCCCTCTC
AGGAGGGCATGATATGGAGAGTTGGGCATTGGCTGTGTTCCCTGA
ATACAGAGTATCTCTCTTGTGGTGCCTGGAACTGGCATCCCCTTT
GTGGAGCTTAGGGCAAGCCCCGCCTCTGCATGAGACTTGGTTTGT
GGGACACACTTGGTTTCAGGGAAGGGGAAAGAGGTCACCAAGGGC
AGAG

[0523] In some embodiments, the intronic domain that promotes trans-splicing primarily in the brain comprises or consists of sequences from the gene DBNDD2. In some embodiments, the sequences from gene DBNDD2 comprise or consist of:

(SEQ ID NO: 470)
AGCTGACATGGACCCAAATCCTCGGGCCGCCCTGGAGCGCCAGCA
GCTCCGCCTTCGGGAGCGGCAAAAATTCTTCGAGGACATTTTACA
GCCAGAGACAGAGTTTGTCTTTCCTCTGTCCCATCTGCATCTCGA
GTCGCAGAGACGTAAGTCCCAAGTCCTGAGAAGAGGGACTGGGGT
AGGGTAGGGAGGATGTCCTGTGGGTCCTGAATCTTGTGGCACTCT
CTCCCCTCTGGTTTTCTTGGCCCTCTATGCTTCTAACTTGGGACC
TGACATGTAACTCTCACTGTCCTGGTGTGCAGCTTGGGTCCTCCT
GACTTGCCCACTTCTTGATCCGCAGCCCCCATAGGTAGTATCTCA
TCCATGGAAGTGAATGTGGACACACTGGAGCAAGTAGAACTTATT
GACCTTGGGGACCCGGATGCAGCAGATGTGTTCTTGCCTTGCGAA
GATCCTCCACCAACCCCCCAGTCGTCTGGTATGCCCCTCTGCTTT
GGGG

[0524] In some embodiments, the intronic domain that promotes trans-splicing primarily in the brain comprises or consists of sequences from the gene TPD52L2. In some embodiments, the sequences from gene TPD52L2 comprise or consist of:

(SEQ ID NO: 471)
AAGGGTGTCCCACATCCTCCCACGGTGCGTGTGCTCCCTCAGCTG
ACGTGATTTGGGGAACACGGGCCGCTCTCGTTCTGTGGAGCTGGC
CAAGCCCAGCTGTCATGCTGTGGCACATTTCACACCTTTGCGCTG
CTGGATGGGGCTGGTTGTGCTCCAGGTGCTGTGGCTTCTCCAAAC
AGGTGTGCCTTGGGGCATAAGGCGTGGACAGGGCGTGGACCCAGG
GGCCTCTTGGGCACAGCCGTGAGGCTGAGCAGTTGCTAGTCATGA
TCTTGCGAGAGCCTCCTGTTGAGTCAGGACTTGAGGAGACTGGAG
ACAGTGCTGCTGTCCCCGGTGGTGTGCGGACTGGAGGAGCCGTCC
TGGAGGGTCTTCCCCTGCTGGGCCTGACTGAGCACGAGCAGGGGG
CCTCCCCTGGGGCTCCCCGAGGAGGGCTGTGAGTGGGTGCTGGCC
TCCCTTGCTTACACTTCGTTTCCTCTTCTCTCCTGCTGCCACCTT
CCAG

[0525] In some embodiments, the intronic domain that promotes trans-splicing primarily in the brain comprises or consists of sequences from the gene TPD52L2. In some embodiments, the sequences from gene TPD52L2 comprise or consist of:

(SEQ ID NO: 472)
TAAGGCTGAGCCTGGACACACCTGTGGAAGACTTTTCTCTGAATT
GGGGCAGGGTGGACTCCGGCAGGGCCCTTGGGCGGCTGTGCTAGT
AGAGGGCAGTGAAAGTGGGATCACCCCTTCCAGGACAGCAGTGCC
AGCCAGGTGGTTGCTGCATCTCAGGGAACAAAGCAGCAGCGTGGG
ATCGACGCAGAGGCCCCCCGGAACCCCCCGGCCCTTCTGTGTCCC
CTCCTCGTGCTTCCCTTCAGGCTCACAGACCGCCTGCTGCCGGGT
CTGTGAATAACTGGCCTGGCGTCCAGGCCTGAGTTTACTCCTGAA
AAGGAGCTTTTTTTTTTTTTTAGACGGAGTCTTGCTCTGTCGCCC
AGGTTGGAGTGCCGTGGCGCGATCTCGGCTCACTGCAAGCTCCGC
CTCCCGGGTTCACGCCATTCTCCTGCCTCAGCCTCTCCGAGTAGC
TGGGACTACAGGCGCCCGCCGCCACGCCCGGCTAATTTTTTGTAT
TTTT

[0526] In some embodiments, the intronic domain that promotes trans-splicing primarily in the brain comprises or consists of sequences from the gene CCT8. In some embodiments, the sequences from gene CCT8 comprise or consist of:

(SEQ ID NO: 473)
GTGCGTTTTGCCTCCATCCGTAAATGGGGCTAAGGCCCGTCACCC
TTAAAGGAGGTTGTGAGGGTGAAATTGAATAACGTAGATGAAATT
GTCTTGAGAACTGCGACGTCGATTATCACATAGCTCGCGAGTTGT
AGGATGGGGAAGAACGAGAACTAGCCGATCCAGAGAAGAGAGTGG
GAAAAAGGGCCGGGTCTTGGTTGCTTGCTTCCCAGTGAGAAACAT
ACGGCTTTCAGCTTAGTTGACAGAAGCCATGCGTTGTAGCCAAAT
GAGTTCCGGTCCCAACTTATGTTAGCTGGCTTAATCTAAAATGTA
ACTTTCTTGGGTTTTGTTTCCTTCGTCTTTAAATTATGGAGATTG
GACCAAGAGGTGGTGTCTTTGAGTTCTGTGTAATCTGCAGGATAA
GTGATAGAGGGGTGCAGATAACACTTTTGTTTAATGGCCTTTTCT
TGAACGTTAGTTCGGTAGCATAGTTTTAAAAAATATCTTACTGCA
CTAT

[0527] In some embodiments, the intronic domain that promotes trans-splicing primarily in the brain comprises or consists of sequences from the gene CCT8. In some embodiments, the sequences from gene CCT8 comprise or consist of:

(SEQ ID NO: 474)
TGACGTTGGTGGCTGGGTCTGGAAGATACGTGGAAATTAAGCTAA
GGATGTGTGGCTTCCAGATCAAAAACCGCAAAAATCTAACGCCGT
GACTACTGACTACGGTCAGAGAGCACAGACTGGAGCAACCTCTCA
CGGCCTGGGCTGTCTGCGCGTGCGTGAGCCAGAAACCCGAGGGGC
TCCCTGGGCCCGCCCTATCGATCGACCCGATCGGGGATCGTCAGC
TTGGTTCTGGCCACAGAGGTTGCTCTTCTCGCGATGCTTCAGACC
TGGCGGCAGGGAAAGGGTGGGCTAATTGGAGAGCCAGGAAGAGCG
TGAGGCGGCCCCACGCTGCTTTCCCAGAAGGCTGTGCGTGCTCCT
CGCTTCCTCCGCGGTCTTCCGAGCGGTCGCGTGAACTGCTTCCTG
CAGGCTGGCCATGGCGCTTCACGTTCCCAAGGCTCCGGGCTTTGC
CCAGATGCTCAAGGAGGGAGCGAAAGTAAGGGCTGAAGGAAAGGA
ATGA

[0528] In some embodiments, the intronic domain that promotes trans-splicing primarily in the brain comprises or consists of sequences from the gene TMPRSS3. In some embodiments, the sequences from gene TMPRSS3 comprise or consist of:

(SEQ ID NO: 475)
GTACATCTGGGTCTCTATGTGGTTCTGCAGCTCTTCCTTTGTTTC
AAGAGGATTTGCAATTGCTCATTGAAGCATTCTTATGATGGCTGC
TTTATAATCCTTGTCAGATATTAATAATTCCAACTCCTGATTCAT
GTTGGTGTTGGCATCAGTTGATTATCTTTTCTCATTAAAATTGTG
ATGCTCCTAGCTCTTGGTATGACAAGTGATTTTCAATTGTATCCT
GGACAATGTGGCTCTCATGTTTGCAGACTTGAGTCCTACCTACAT
TTTCAATGTTACCCTGTTTAAATGTAGTTTGTAGATCCTGGCCTA
CAGAATGAATGCACTGATGACTCTGCCAGGTAGATTGGTGGGCTG
TAGTTCCAACAATAATTTTAGAGCCTTCGTGGGCTGTGTGCTTTG
TCTGGTGCCACCTTCTCCCTGTTGGTGCCACCTTCTCCCTGTTGG
TGCCACCTGGAGGCAGAAAGAGCTTCTTGAGGCCAGACCAGCTGG
GGCC

[0529] In some embodiments, the intronic domain that promotes trans-splicing primarily in the brain comprises or consists of sequences from the gene TMPRSS3. In some embodiments, the sequences from gene TMPRSS3 comprise or consist of:

(SEQ ID NO: 476)
CATAGCTAATTCCAGTGGACCATGTTATGGCAGAGACAGGGTGAG
ACGGTGGTGCGGGAGGCTAGAGGGAATATGTTGGGGGCCAGGTAC
TGGGTCTCTTCTTAAAATCTCAGGAGTTTAGAGTGCAAGAAAACT
ACAGAAAAGACTTCCAAACACAATGGTTCTCCCTGATATTTTTAC
CCCCTATTTTGTTGCTGTTTGATGAACAGTAGTGCCTGATAGACT
CCTTGCAGTGACCAATGTTGAGTTCAGCCCTCAAATGCCAAGACG
ACCTCAGAGGTGCTGAGAGTGAGGTCTGGGAAACACATGGGGTGT
GGGTCTGTGTTTCTGTAGGGCGTGGCAGTGCAGTTGCATATACAG
CATAAACAAGCAGGGTGATGGGACCACATCTTGCCTGATAACCTC
TCCCACCATCTTCCTAGGTTTTCAGGATACCTGAGGTCAATGAGT
TCAGTGGTTGGACTTTTCCTGTGCTTCACCTCTTGCTCTTCTCAT
TTCA

[0530] In some embodiments, the intronic domain that promotes trans-splicing primarily in the brain comprises or consists of sequences from the gene PFKL. In some embodiments, the sequences from gene PFKL comprise or consist of:

(SEQ ID NO: 477)
CGGCTGTCTTTCTGGGGGAGCTTGTCTGTCTGTCTGGGGGGCTTG
GCTTTCTGGGTGTGTGTGGGATGCTTGCTGGGTTCCCGCCCCAGT
TTCAGCTGTAGCAGCCGTGCTCCCATCTATGTGGGGATGTGAGGG
AGGCACTGTTCCTTTAGAGACGGCGTTGCTTGCTCAAGTGGAGAA
GCTGCCAGTGTGGGCAGCTCCAGCTCCCTGCACGCTCTGTGCTCT
GCCCATTCTAACGTCTGTGCCCCTTCTTCTGGATGGCTGCCGGGC
TTGGCTCTGGCCCCCCTGTTGGATCCCCTGGCTGCTGGGTGGGGA
GAGGGCCACCTACTGAACCTGAGGGTGGGTCTGGGTGAGTCCTGG
CTCTGCTGCCACCTGCTGGGCTCTGGAAGGTCCCTCACCCTCCCT
CTGGGATCTCATTGGATTCCTGTAGTGTGGGGATGGTGGCAGATA
CTCTGGCTGCTACGTGAGAACAGTGTGCCGATCCCTGGGGTTTCT
CAAG

[0531] In some embodiments, the intronic domain that promotes trans-splicing primarily in the brain comprises or consists of sequences from the gene PFKL. In some embodiments, the sequences from gene PFKL comprise or consist of:

(SEQ ID NO: 478)
TCAGCACCTCCAGCCTCTGCAAGTACAGGGGGGTGGGAGGGCAGG
GGCTTTTGAGGGGCACGAGGCTTGGGGACAGAGGACCCGCATGGC
TTAGGGATGGATGGCATGGTATGGGTGCTGGGAGGGAGGCAGGAA
GAGCAGGGCTGGTCCCAGGGGCAAGCACAAACTCAGGCCTGTTAC
ACGGCCCCAGACCTCACTCAGAAGGGGACCCTGGCCGCTGGCGTG
GGTTTCCTCCTCTCTGAAGATTAGGTGGTCTTGGCTGCCCCTTTT
GTATGAAGTCATGGATATCTTTTGAGATGGGGGCTCTCGGGAAGA
AGGTGTGGGGTACATTAGCACCAGCGTTTCCTGAGTGCCGCCTCC
CCCGTTAATGTCCCTCTCCAGGAAACTGGCTTTGCCAAGGCCCCC
GCTGGGACAGACTGTTTCTTTCACTGCAGTCCTGGGAGCCGAGGG
CAAGGGGACAGGAAAGAGGAAGTGACCTCAGAGCCTGGTGGCACC
AGCA

[0532] In some embodiments, the intronic domain that promotes trans-splicing primarily in the brain comprises or consists of sequences from the gene S100B. In some embodiments, the sequences from gene S100B comprise or consist of:

(SEQ ID NO: 479)
GTGAGAAAGAGCCAGGCCAAGAGGACGCTCAGGAAGAAATGGTTC
TTTTCTTTTGGGTGGAACGGAATGGAGGGGTAGAAACTAAGTGGT
AGCTTAAAAAGCCCCTTTAGGACAATTGGCAGCATTTCAGAAGTG
TCAATAGGATGATGTGTTTTAATCTCCACATTACTGCTGCTTTGT
GGACACCTGACTGCATCAGCCCTAGACAGCTAGAGGTGTGTTTTG
CCATAAATCAGAGAAACGTCAGGTTTCATGGCCCAGAAGTGATTG
TTGACATTTTCCCAGCGGTACTACAAATACTGCCTCTTCTGTAAC
TATTTGAAGAGTAAAGATTTTGCTTCCCACTGGGGCTAAAAATGA
TGGAGAACCTAATGCTAGTTTAGTCCTATATCATAAATAAATGCT
TCCCTTTTCTCCTTATATTTCTTCCACCGCCCTGGGTAAGTAACT
CTTCAGTTTTCCAGTTTCCCTCAGTTTGAAGTGCCAGGGTCCCCA
CAGC

[0533] In some embodiments, the intronic domain that promotes trans-splicing primarily in the brain comprises or consists of sequences from the gene S100B. In some embodiments, the sequences from gene S100B comprise or consist of:

(SEQ ID NO: 480)
AGGCAGCCCCGTTGAGCCCAGGGCTGACCACAGACAAGCACTACT
GTCCACAGAACTTCACGCCCAGTGGGGCCAGACTTGGAGGATGGC
AGAGGAGAGAAGCTCCAGGGGCCTCTCCATTAGAAACCAACTTGC
AGGCCACTTAATCTCCTATGCTCAGCCTGTACTTGGAAGCTGCTT
GTTCTTGGCTGCACATTTGCTTTGTTTGAATCAATTAATCCAAGT
CTCTCTCCTCTCCCCACCCCCAACCTTGCCTTTAGGGTGACATCA
ATATTCATGTAATAAAGAAATCGCACAAAAAGCTGACTCCCCACT
TCCTGCCCTACAGGCCCTTTTTTCTTCCTCAGCCCATGTGCAATC
CTGGCTCCCAGCAAGTCCCCGGGGCTGCTTGGTCAATGCAGCCCT
GTGTGCAGGCCTGGCAGCCCTGCCACCCCCGCCTTCGGCTCCCAT
TGGCTGCCACGGCCTGCAGTGGGCTGCACCAGGGTTCATCCATCC
TCCC

[0534] In some embodiments, the intronic domain that promotes trans-splicing primarily in the brain comprises or consists of sequences from the gene RANBP1. In some embodiments, the sequences from gene RANBP1 comprise or consist of:

(SEQ ID NO: 481)
TACTGGTTTTGAATCGCGGCGCGTTTCCCGCCGCTGGGGTCAGGG
GTCGAGGTTCGGGTCGTGGGGCGGAGGGAAGAGCGGGCGGGCGGG
AGGCGCCGGCGCCAGACGCGGAGGGAAGGAGCTACGAGTAGCCGC
CGAGAGGCCGCGGAGCCAGCGACGACCGACCCAGCCGAGCCGCCG
CCGCCGCCGCGCCCCCATGGCGGCCGCCAAGGTGCCGCCGGGCCC
AAGCGGGGACAGGGTGGGCGGGCGGGGCCGGGGCCGTTATCAGCG
GCCACGTGGGCGGCCCGCGCCGCCGCCACCAACCTCCGCCGGCCT
GCAGGCTCGGCCGTCTGCTGGGCCTCGGTGGCGCGGAGTCGGGGC
GCGTGGGGTTTGGGGGCTCGAGGCCTGCGGAGTTGGGGCGTTTGG
GGGTGCAGGCTCTGCAGAGGCCTGGGGGCTGCAGGGCCCCCGCGT
GACCTTGGGGTGGGTTGGGGAGCGGCCGTCGCCACGCGGGACGGC
CCCA

[0535] In some embodiments, the intronic domain that promotes trans-splicing primarily in the brain comprises or consists of sequences from the gene RANBP1. In some embodiments, the sequences from gene RANBP1 comprise or consist of:

(SEQ ID NO: 482)
CATGTGTTCTGGAAGACTCGAACCTAAAATATGATTATTGGTGCT
CTCTTATCCTCTAAATTGGGCCAGGATTTCATGACTTTCACCGGT
ACAATTTATCTAGTTATTAACTTAGTTTTCTGAACTGTGAAAAAA
TTGCTGGCAGAGCTGTGAATCCAGTGTAAATACTAGCAGTCCTGT
AGCGACTTTTTTCGTTTTACTAAGCAAGAGCACAACTATTTCCTA
ATTAGTCAAAACTGAAAGAGTTACATTTTGCTTTAAAGTAATATT
TCAAAATCTATTTCGACCCATCATTGTGTCCTTTGATCTTCACAC
AGCAGGTATCATCTGCATTTTATGGATGAGGAAGAAACTGATGCT
CAAAGAGATGAGGCAGTTTCTGCCAGGCCACTCTCTGCAAGTGTT
GGCGGCTTGTAGGGTCCCCCATCAGTCTGTGCACAGATCTGATTG
ATGTCTGTGAATCTGGGGGAGGGGCCCCAAGTTCTGGTGTCTCAC
TCTG

[0536] In some embodiments, the intronic domain that promotes trans-splicing primarily in the brain comprises or consists of sequences from the gene UBE2L3. In some embodiments, the sequences from gene UBE2L3 comprise or consist of:

(SEQ ID NO: 483)
CCTGCCTCAGCCTCCTGAGTAGCAGAGATTACAGGCGCCCGCCAC
CACGCCTGGCTAATTTTTTGTATTTTTAGTAGAGACCGAGTTTCA
CCACGTTGGCCAGGCTGGTCTCGAACTCGTGACCGCGTGATCCAC
CCGCCTCGGTCTCCCAAAGTGCTGGGATTACAGGCGTGAGCCCCC
GCGCCTGGTCAACTATTTTATGCAATCAGTATTTATTATGCTCCT
ACTATGTGCCAGGCACTGGTTGTAACTGCCATCTGATTGGACGAT
CCGTAAACGCTGAGGCCCAGTCTGTGCGGTTCACTTGCGTTCCTC
CACGCGCCCCCCAGCACAGTGGGAAGCACACAGTAGGTGCTCCGC
TCTGCTCCTGTGCCCCGCCCCGCGGCCCCTCCCCCGCTCCAGGAA
GTGCGGGGGCTCCAGCCGCCCGGCCGGCCGCGATGCATTCTGGGG
AAGGAGCAGCACCAAATCCAAGATGGCGGCCAGCAGGAGGCTGAT
GAAG

[0537] In some embodiments, the intronic domain that promotes trans-splicing primarily in the brain comprises or consists of sequences from the gene UBE2L3. In some embodiments, the sequences from gene UBE2L3 comprise or consist of:

(SEQ ID NO: 484)
TAAGTTCCAACTCCAGGAAGGCCTGAGGTCGGCCCCGATCGCGGC
GCGGTTCTGCTTCCCTCTCCTCCACTCAGTCATCCCGATCTCCCC
TCCCTGATAAAGTGCCATTTTTGGGGGGATAACGGTTGATTTCAG
TCGTTCGAATCAAAACGGGCCAAAGTTTATAATAATAATTTGGTA
CTTTGGATCTTGAATGCAGCAGGGTGCTTTCTCGCTAATTGGCAC
CTTTTGGTGAGGAACACATGCTAAATTGGCTTAGTACTTTTGCCA
GTGGATTTGCCAAGGTCCTCTGTAGCCCACCCCGCCAGCATCTGT
GAGTCGGCGGCTGGGTAGTGCTGCCGGCCTGCAACGGGCCGGAAA
TTAAAAAAAGGCCCAGGAGCCAGTTTCCTGAGGGGAGATAAAGAG
CTGGGGTTCGTTCTAGGCGGAGCAGTGCTTGGTAGAGCTAGACAT
TGAACTTGGAGCCACAGTCTCTGAGCATTCCCTCCGTCCCTGGGA
ACGT

[0538] In some embodiments, the intronic domain that promotes trans-splicing primarily in the brain comprises or consists of sequences from the gene CSNK1E. In some embodiments, the sequences from gene CSNK1E comprise or consist of:

(SEQ ID NO: 485)
GTGATCTGAACCTGAAGTCCGAGGCCCCAAGAGTTCTAAGTAACC
CAGGGGTGGAGGTGGGGTGGGGGATCCCAGCTCTTTCCGATCTGG
GAGATCAGAAAGATGCTCATCTGGGAGAGTGGGACCTCCCCTTTC
AGTCCGCCCACCCCCGAGGACCGCACTTGGAGGGCCGCACTTGGA
GGACCGCGCCTCCAAGGCGGGCGCGGCTGACGCCCGGGGCCCAGG
CCATGTGGGGCGTGCGTGCCGGGAGAAGTGTCCCAGCGCCTCACC
CCGCAAGCATGAGAACCACGAAACCCCCGGGGCCGGGAAACCGGG
GCGGGGCGGGGCGGGGCGGGGCCGGGAAGCGGCGCGGGGCTGGGC
CGGTGACGTCGCGGCCCCGCCCCCGGCCGGCTCCCTCCTCCCGGA
GCGCTCCCCAGCGGAGTCCTCACCTGCAGGCACAGGTGTGCGCAC
TTCGCATCTCGAAGGCCGGCCAGCAAGCTTCAGGTGAGCGCCAGC
AGCA

[0539] In some embodiments, the intronic domain that promotes trans-splicing primarily in the brain comprises or consists of sequences from the gene CSNK1E. In some embodiments, the sequences from gene CSNK1E comprise or consist of:

(SEQ ID NO: 486)
GAGACCCCATCTCTACAAAAGATGGAAAAATTAGAAAGGTGTGGT
GCTCGCCTGTAGTCCCAGCTACTCAGGAGACTGAGGTGGGCAGAT
GGCTTGAGCCCAGGAGTTCGAGGCTGCAGTGAGCCGTGATCACAC
CACTGCACTCCAGCCTGGGCAACAGAGCAACACCCTCCCTGCTTC
AAAAAAAAAGTAAATAAAAAGATCTCCACAATGAACAGGTATTCT
GCATGACTTCCTTGGAAGAGATTTCCAGAAATGGAATTGCTGCCC
TAAGGCAAACGCTAATTTACGACTCTTGGGCAGCTGGAACCTGTC
CGACAGAGCGGAGACCCTTATCTCTGCCACCACCAGCAGGCTGAT
ATTTTCAAGAAAAAAATTTGCCAAATACAAGCAGTCTCAGATAAT
ACAAAGAAGATGGAAAGTTTCCGGAGCGCAGGTGTCAGATCCAAA
GATAACTTGACCCAAACACCCCGATCTCCATGTCCCTATCTCTCT
CTTA

[0540] In some embodiments, the intronic domain that promotes trans-splicing primarily in the brain comprises or consists of sequences from the gene SUN2. In some embodiments, the sequences from gene SUN2 comprise or consist of:

(SEQ ID NO: 487)
GCTACTCGGATGTGGACCAGCAGAGTTCCAGCTCGCGGCTCCGAA
GCGCCGTCTCACGGGCGGGCTCCTTACTCTGGATGGTGGCCACTT
CGCCAGGTGGGCTGCAACCCGTGCCCAGTTACTTCCATTCTTGGT
GATAGTGCTTTCTTACCCATCTCTCTGCAGTTGGGCATCCTGCCC
ATGCAGAGAGACTGTAGGACCATTGGGGAAAGGTCATTCTAGAAT
AATCACTGGGAGCCCAGAGCTGTGGGGACCCCCTTGCGTGGAAGG
GAAGGAGTAGCTGCAGAGCAGGACAGAGGGTGTGGGCAGGTGGGA
TCCAAGGACCTGGGTCCCGGTAGGGCAGGACAGAGGCATACTGGC
AGGTGGGGGTGGGGTAGGGGCAGGGAGGACGGCAGACGGGACAAA
GGAGCGGTGCCCCCAAACACCATATGGAGCCTTCGGCTTGATGGT
CATTCTTCCAGGCCGGCTCTTCAGACTTCTCTACTGGTGGGCTGG
CACC

[0541] In some embodiments, the intronic domain that promotes trans-splicing primarily in the brain comprises or consists of sequences from the gene SUN2. In some embodiments, the sequences from gene SUN2 comprise or consist of:

(SEQ ID NO: 488)
CTCCCTCCTGAGCAGATCCGAGGCTGCTGGGAGGCCTCAGGAAGG
CTGGGCAGGGAGCCCCGGGGAGCTGGAGAGAGGGCAGCATGTGGC
AGGCACAGCGCCCCTCCCATGCCCGGCCCTGGGTGCGCCCCAGCC
TGGCCTGCGGTGGCCCCTGGTGCCCTGGGCTGTGACTGCCCTTCA
CTTGTCTGTCCTCCCCACCCCACGAGTCTATGGCAACCTAAGGCC
AACATCCTTGCATTCAGGCCCATTCCAGCACTTTCCTGTGGGGCT
CACACATGGTGGGTGCTCAGTCATTCTGAGTGGTGTGCATGTCAG
ACCCCAGCACCTAGTTCTGAACAGCAGCTTGAGGGGTGGCTGGTG
AGGAGAGGGATGCAAACAGGAAGCTGTCAGAAGAAACAGAATGTC
AAAGAGCTCCCATTTCATTCCTTACTGCACACCGGGCCTGTGTGG
GGCTGTGGGGATGTGAAGGAGGGTGGGTGACTTGTGGTCTTGGCT
CACA

[0542] In some embodiments, the intronic domain that promotes trans-splicing primarily in the brain comprises or consists of sequences from the gene ATF4. In some embodiments, the sequences from gene ATF4 comprise or consist of:

(SEQ ID NO: 489)
GGACCCCGGGATCCCTCTCCCAGCAGCCGCCCATCTAGGGCCCTG
AGCCAATAAGAGCTCGAGATATATATGATTCACCGGGCCTGGGCC
AATCACCTTGACGCGCGCTCTTCGCCAGCACCTCGCGCGATAACC
TGGCGTCCTCGGCCTTCACAATAAAAACTCTTCGCCGGAAAACGA
CCTTTCCCCGCCCACTGCGCTGACACCGGAAGCGAGGCGTGTCTG
GGAGATCACTCCGCGCTCCGGCGGCGAAGGAAAGAACGGACTCTG
ATCATAGAAGCCTAGTAAAGTAGTACACCTCTCTCCTTTCGTGAG
GCCATAAGAACAAACTCCTTTTCTCGTCACAGCTACGCCCTGGGC
ATAAACGGTTGGGGCGTCAAAGGGAGGGAGGGAAGGGAGCGGGCG
GGAGGAGACGGTCACGTGGTCGCGGCGGAAGGATGCGTCTGTGCT
GCGTCCCCATAGAGACGAAGTCTATAAAGGGCCGGCGGGCGGCCA
CGGC

[0543] In some embodiments, the intronic domain that promotes trans-splicing primarily in the brain comprises or consists of sequences from the gene ATF4. In some embodiments, the sequences from gene ATF4 comprise or consist of:

(SEQ ID NO: 490)
TTCTACTTTGCCCGCCCACAGATGTAGTTTTCTCTGCGCGTGTGC
GTTTTCCCTCCTCCCCGCCCTCAGGGTCCACGGCCACCATGGCGT
ATTAGGGGCAGCAGTGCCTGCGGCAGCATTGGCCTTTGCAGCGGC
GGCAGCAGCACCAGGCTCTGCAGCGGCAACCCCCAGCGGCTTAAG
CCATGGCGTGAGTACCGGGGCGGGTCGTCCAGCTGTGCTCCTGGG
GCCGGCGCGGGTTTTGGATTGGTGGGGTGCGGCCTGGGGCCAGGG
CGGTGCCGCCAAGGGGGAAGCGATTTAACGAGCGCCCGGGACGCG
TGGTCTTTGCTTGGGTGTCCCCGAGACGCTCGCGTGCCTGGGATC
GGGAAAGCGTAGTCGGGTGCCCGGACTGCTTCCCCAGGAGCCCTA
CAGCCCTCGGACCCCGAGCCCCGCAAGGGTCCCAGGGGTCTTGGC
TGTTGCCCCACGAAACGTGGCAGGAACCAAGATGGCGGCGGCAGG
GCGG

[0544] In some embodiments, the intronic domain that promotes trans-splicing primarily in the brain comprises or consists of sequences from the gene KIAA0930. In some embodiments, the sequences from gene KIAA0930 comprise or consist of:

(SEQ ID NO: 491)
GTGGGGGTCGGGAGTGGTGAGGGAAGGGTGGCGCATCTCAGAGCC
CTCGCAAATTTCTGGCCAGAAATGTGGGGGTATGGGCGCAGCTTG
GCCAAGGCCATGCTGCAAGGGCCAGGGTGGCCGTCCTTCCTCACT
CCTGTCTGGCCTCCCTCTGCAGGGTGCTTCAAGGATGACCGCATC
GTCTTCTGGACTTGGATGTTCTCCACCTACTTCATGGAGAAATGG
GCTCCCCGGCAGGACGACATGCTTTTCTATGTGCGCCGGAAGCTG
GCGTACTCCGGCAGCGAAAGCGGTGCAGACGGGAGGAAGGTGAGT
GACCCCCGGCCCCTGCCCCTGCGTCTGTGCCCCAAGCATCCCTGT
GGTGTCTGCTCTCGGTGTACATGTGGGCTTTCCTACAGTGCTCAT
GCATATCAAAGAGGGTGAGTGATATTTATTGAGCACCTACTGTAT
TCCAGGAACTGTGTAGACAGTCTCATGTGCAAATCTGGATGTGCT
GGGT

[0545] In some embodiments, the intronic domain that promotes trans-splicing primarily in the brain comprises or consists of sequences from the gene KIAA0930. In some embodiments, the sequences from gene KIAA0930 comprise or consist of:

(SEQ ID NO: 492)
AGAGCTTGGCTGCATATTTTGAAGTGTTGAATCTGTCTAGAGAGG
GGACAGACCCACCTATGTTGATCCTGCTGTGTGCCCGTGGTCTCG
GTTTGTCTGCATGTGCCCCGAGGAACCTGTGGCTCAGAGCCCCCG
CCCATTGTCCCATCACCAGCGGCAGCGCTGGAATGGAAACCCAGA
TCTTCCCTACCAAAGCCTGTGGGCTTTTTCTCTTTTGCAGGAAAA
TATTACAAATATTTATCATAAAGAAATACCATTTGTAATAGAAGG
AGAAGTCCCTGTGAGGATCAGATGAGCACGAAGCTGCGCAGACGT
GGGGCAGGGGTGGGGCGGGTGCTGTCTCCCTGCGGTTCCCGCTTG
CAGCCTTGGCTGGCTGGAGGGCGGCTGTCCCTTTAAGTCGGGTTC
CCGCTGGGACTGCCGCAGCCAGGGGGAGTGGGTGGGGGTGAGAGA
TGTTGGTGAGAGCCCTGCCTCTCCAAAGGCTCCCCCCCAGCCAAG
CCTT

[0546] Intronic domains that promote trans-splicing primarily in liver tissue

[0547] In some embodiments of the compositions of the disclosure, there may be an intronic domain that promotes trans-splicing primarily in liver tissue.

[0548] In some embodiments of the compositions of the disclosure, the intronic domain is derived or isolated from human genes that feature exons that are primarily included in liver tissue during the process of RNA splicing.

[0549] In some embodiments, the intronic domain that promotes trans-splicing primarily in the liver comprises or consists of sequences from the gene MASP2. In some embodiments, the sequences from gene MASP2 comprise or consist of:

(SEQ ID NO: 493)
GTGAGTTAAAACAAAGTACACCACGATCAATGACGATTGCTTTGA
AATGTAAACATATTTCTATCTGCAGATATGTGAAAGGAAAGTGAG
AAAATCGTGTGTCAGCATGATTTCTTTTGTCTATCTTTAAATGAT
AAAAAGCCAAGAAATAAGTTTTCAGAGGACAAAAAGGATGGCTAT
GGAAAATGTGATTCTGAATCCCGCCCTTTTTTCTTTCTTTCTTTA
TACTTAACTTTAAATTTACATAAGCGAGCCCTTTGTTTTAAAGCT
AGTTTGGAAAGCTGGTGATTAAAATGGGCAACTTGGCCAGGCGCG
GTGGCTCACACCTGTATTCCCAGCACTTTGGGAGGCAGAGGCAGG
CAGATCACTTGAGGCCAGGAGTTCAAGACCAGCCTGGCCAACGTG
GTGAAACCCCGTCTCCACTAAAAATACAAAAATTAGATGAGGTAG
TAGCCCCGTCTCCACTAAAAATACAAAAATTATTAGGTGGCGGGC
GCCT

[0550] In some embodiments, the intronic domain that promotes trans-splicing primarily in the liver comprises or consists of sequences from the gene MASP2. In some embodiments, the sequences from gene MASP2 comprise or consist of:

(SEQ ID NO: 494)
TTCACAACAGCCCTGGGGCAACTATTATCGTCAACCGCCCCCCAT
CTTGCAGATGAAGAAACTGAGACTCAGAGAGGTTACACATAACCA
TGGGGAAATGGAGAGCTAGGATTTAAACACAGCTCCAGTCCCATG
CAAGTCCCAAAGCCTCCCCTGAGCTCTTTTCCTCGGAGTTACACT
CTCTCTTGGTTTTGAGCCATGGCTCTGAAGTTCCTGGCATGGAGC
AGATGTTCTATTTGTGGGGACTGCACCATCTTCCCACATAACCCA
GCTTTCTCACATACCTTTTGCTCAGTCCCAGGGAAAACAAGAAAC
CTTAATTTGCAAAAGCACCTGAGAGTTTAATCTTGCCTTTGGTTT
TAAAGAACCCTACCCCACGTATGGTGAGCTCTCTTTACATGTTAA
GTATTCTTTATAAACTAAGAACTTCAGATGGCTCGATTCAGTCTT
GGCTGCTGTAGACCACATGAAAACCAACAAGCCTGGTTTCCTCTG
CGCA

[0551] In some embodiments, the intronic domain that promotes trans-splicing primarily in the liver comprises or consists of sequences from the gene AGMAT. In some embodiments, the sequences from gene AGMAT comprise or consist of:

(SEQ ID NO: 495)
GTAAGGAGATTCCACCAGTGAAGATCCTGGGGGTGGAGACACTTA
ACACCCATTTTCCTGGGACTTGAAGCGAATCTTTAGGAATCAGGA
TAGGATTTTTGTTTGTTTGTTTGAGACGGAGTCTCACTCTGTCGC
CCAGGCTGGAGTGCAGTGGTGCGATCTCGGCTCACTGCAACCTCC
GCCTCCCAGGTTCAAGCGATTCTCCTGCCTCAGCCTCCTGAGTAG
CTGAGATTACAGGCACATGCCACTACGCCCGGCTAATTTTTGTAT
TTTTAGTAGAGATGGGGTTTCACCATGTTGGTCAGGCTGGTCTTG
AACTCCTGATCTCGTGATCCACTCACCTCGGCTTCCCAAAGTGCT
GGGATTACGGGTGTCAGCCACCGCGCCTGGCTGCCAAGGTAGGAT
TTTAAGAGCAGAGCACCTAGGCCTTTTCTGTTCTCTGGGCTGAGG
ATAAGTTTGAATACCCTCTTACTGAAGGGTGATTGATTTTGGCAA
GGGC

[0552] In some embodiments, the intronic domain that promotes trans-splicing primarily in the liver comprises or consists of sequences from the gene AGMAT. In some embodiments, the sequences from gene AGMAT comprise or consist of:

(SEQ ID NO: 496)
TGAGATCGCGCCACTGCACTCTAGCCTAGGTGACAAAGTGAGACT
CCATCTCAAAAGAAAAAAAAAAGAGGGGAGGAAGTCCGGACCCAA
GATGAGTTGCCACCTTCTTAGTTCTGGTCCTCGTACCCTCTAGGC
AGAATGGCTCTCAGATAGACGTGTATGACAAGACCCCAATGGAAC
AGACCCAAATCCCTTGCTTTTAGAGCGTGCCAAGGCCAGTCTTCT
GGACAGAGCAATTCAAAAGGTGCTAGCGTGAGCTGCTGTTTCCCA
CTCTTGCTTTAGCAAAGCTTCTCTCTGATTCCAACTCCATCAGTC
AGCTTTGACCCTGCTTCCTTACCACTCATTGTCCCTCCCTTCCTC
ACCTGTAAAATAGGATAGTTCCCTCTTCATGGAGATGGAGGGTCA
AGTGTCATGTGCACACAGAGCTGAGCATGGGGCTGGCAAACAGGA
AATGCCCTGTAAATGCTGCCAGACAGAAACCTCAGTCCCTGTCTC
TGCA

[0553] In some embodiments, the intronic domain that promotes trans-splicing primarily in the liver comprises or consists of sequences from the gene MFSD2A. In some embodiments, the sequences from gene MFSD2A comprise or consist of:

(SEQ ID NO: 497)
GCTTCCGCAATGAATTCCAGAATCTACTCCTGGCCATCATGGTGA
GTGGGACCTGAGCAGGGGCGGGCAGCCTGGGCTGAGGTGACATAG
GCTGTGGAATGGTTCTTGGAATAGGCAGAGGATGTTTCTCAGGCT
GGCCCAAGGTCATGAAAGGATGAGGGAGGCTTCTCAGGGTATTTG
GTTGGACCTTGCGAAGGTAGGACTGTGAAAGAAAGAGTTTGAGGT
TAGATGTTTGAGTAGTGAGCACAGCAAAAGCAAGGGCGAGGACAC
CAGGAACTTGGCTCAGAGGTTTGAGAGGGCAGCAGACAAGGTGGG
CCTGGACCAGCTCTGAGCTCCCCTGGGGAGCCGTCAAAGGTGCCT
GTCATCTTCGTTGCTGCCCACATGATGTCATCTGGCTGCTCTTGG
GCAGGGCTGGGAGCCACTTTGGGGTTCTGGGAAGGGCAGGAGGGG
CTCTGTGGCTCTAAAGCACCTCCCTTTAACCCCCTTTGTCCATCC
ACAG

[0554] In some embodiments, the intronic domain that promotes trans-splicing primarily in the liver comprises or consists of sequences from the gene MFSD2A. In some embodiments, the sequences from gene MFSD2A comprise or consist of:

(SEQ ID NO: 498)
TGAGTGGGGTTGAAGAGCAGAGCCTGGGTTGAGTTGGGATGTCTG
GTGGGAACCTCCCAGCTGATTCATCTTCCTGCACCCCCTTCCCTA
GTCAGCAGTGCCATTTCTCATCTTGGTGGCCCTCATGGAGAGTAA
CCTCATCATTACATATGCGGTAGCTGTGGCAGCTGGCATCAGTGT
GGCAGCTGCCTTCTTACTACCCTGGTAGGTATATACAGGCCCCCC
TCCTCGGGTATCTCCAGCCCCTAGTCCCCAGTTTTGAAGCTCCTT
AGGGAGAGTTCTATGCAGTGTTCTCCCACAGGCCATTCTGTGGGT
CCAGGTTAGGAGTGGGGGAGGTCTGTCCTGTACAGTTGTACAGGT
AGTGAGCTTTGCAAGAACACCTAGTCAGAGTGAAAAATGGGGGCT
GTAATCTGGCCTGGGCTCCACTTGCCACGCTGAGCACCTCCAGGC
AGGGTTACTTCCTCTTAGAGCAAGAGGCCTTTTCTTATTCATGTG
AAGG

[0555] In some embodiments, the intronic domain that promotes trans-splicing primarily in the liver comprises or consists of sequences from the gene EBNA1BP2. In some embodiments, the sequences from gene EBNA1BP2 comprise or consist of:

(SEQ ID NO: 499)
GAAGCGGAAGTCCCAATCAAAAGTTGAGCAGTAGCTGTGAGTTGC
TGGCGCTGGAGCGATTCGGTGGCACGTGGAGCCACGGCGTGGGAG
TAGGGGGCTGAAGGCAGGCAGCAGCGGCCAGGGCCGCCCTCTGCT
AGCCGCTTGGGTCTCGGGATACCCCGTTTCTTCCTGTAGGTGTGG
GACGTGCGTGCGGCGAGATGGACACTCCCCCGCTCTCGGATTCGG
AGTCGGAATCCGATGAATCCCTTGTCACAGACAGAGAGGTAGGTG
TCAGCCGAGCTCGTGGGGCTGGGCGTGGGAGAGGGGGCCTTACAC
CCCTGGGAGTGACCGTGATTGTGTCCTGCAGTTGCAGGATGCGTT
TTCCCGAGGGCTTCTGAAGCCAGGCCTCAATGTCGTGCTAGAGGG
GCCGAAGAAGGCCGTGAACGACGTGGTGAGCGTGGGCACAGGGTC
GGGGGTACTCGGACATGGGATGCGCTTCAGGCGCTGTTGGGCTTG
GGAG

[0556] In some embodiments, the intronic domain that promotes trans-splicing primarily in the liver comprises or consists of sequences from the gene EBNA1BP2. In some embodiments, the sequences from gene EBNA1BP2 comprise or consist of:

(SEQ ID NO: 500)
AGTTTCATAATACAAGTCGCCATTTATTTCCTCTACATTTATAAT
ACTGCATATATATTCAAATTGGCCAAAATCTTTCTTTCCAATCAT
CATGCTGGGATTATGGGGTTATATGTGGCACATACCATTCCTGTA
TATGTCAGGATGGAAAAAGTTTTACCTGGAATGAATTTTTGCCAT
TTCTGATCCACATTGTACTTCACACAGTGATTTCCTGAAGGAAAT
ATAATGATCTGTTCATCGAAGTAGAAGATATTGTTGGCCACGTGG
GATCGAAGACCAAAAACATGCAGCGTCTGAGCTACCACGGCTGAC
ATGATCTCCCGCCAAACAGTTCTGCTGAAGACCAAGGCAGCGCTT
CAGAGTGGAGAGCACCGCCCCGCTCCGACCCCGCCCCCGGCCCGG
ACTCGCCCTCCCCGCCCTTTGCTCCTCCCCTTGTCTCTCCCCTTT
CTCCTCCCCTTGTCCCTCCCCTTTCCCCTCCCCTTGTCCCTCCCC
TTTC

[0557] In some embodiments, the intronic domain that promotes trans-splicing primarily in the liver comprises or consists of sequences from the gene PRDX1. In some embodiments, the sequences from gene PRDX1 comprise or consist of:

(SEQ ID NO: 501)
GTGAGTGAGACTCCGTCTCAAAAAAATGTGGAATAGAACAAACTT
TAGTTTTAGGAACTAGACTTTATATTGTAGATCTAGTTGCAATTG
ACACGTCCTTGTTT
TATGGGAGGCTACATACTTTAAAGGTTTCCAGGGGAGCAAATAAT
TAATTATGATTTTGTGTATGTGTGTTTGTGGGGGGTAGTCATCAG
GAAATGTCTGAGGCCTTTTGCCTTACCGTGTGGGTCTGGCTAATG
TGTAATGTTTTGACTCAAGATTGTAAAGTCAAATTATTCATCCGG
GGAGAGGATGGTCGTGTAACTGAATCAGCCTCCCAAGATGAACTT
TCCCTCTGGCGTAAGTTTAGGAGTCCTGATATTTTATTTTCCTTT
ACAACAGAAAGCAGCAACCCTGTAATTAAAGAGAACAATGAAGGA
AGCTATCTAAGCCATGAGGGTTACTGAGGATCTGCGCTGGGGTTA
AGGCTGCGAACTTAAGAAATATTTGGATAGACAGT

[0558] In some embodiments, the intronic domain that promotes trans-splicing primarily in the liver comprises or consists of sequences from the gene PRDX1. In some embodiments, the sequences from gene PRDX1 comprise or consist of:

(SEQ ID NO: 502)
GCCTCCGGGTTCAAGCGATTCCCCTGCCTCAGCCTCCCAAGTAGC
TAGGACTACAGGCGCGCCACCACACTCGGCTAAGTTTTTGTATTT
TAGCAGAGACAGGGTTTCACCATGTTGGCCAGGATGGTCTCGATC
TCCTGACCTTATGATCCGCCCTCCTAGGTGGCCTAAATCTACATT
TTTACATAAGATAAGGTGAATGTTTGAAGAAAAAGGGAATGGAGG
AAGAAAACAATTATGTGGTGGACTCAGGGTAATCTAGTAGTAAGG
TACTACTAGAAAGGTAGAAAGTAGTCTAGTAGAAAGGTAATCTAG
TAGTGAACATTTATGGAATTTGTGGAATAGAGGCCAGGTGCGGTG
GCTCGCGCTTACATTCCTAGCACTTTGGGAGGCCAAGGCGGGCGG
ATCACCTGAGGTCAGGCGTTGGAGACCAGCCTAGCCAACATGATG
AAACCTCGTCTCTACTAAAAATACAAAAAATTAGCTGGGCGTGGT
GGTG

[0559] In some embodiments, the intronic domain that promotes trans-splicing primarily in the liver comprises or consists of sequences from the gene FGGY. In some embodiments, the sequences from gene FGGY comprise or consist of:

(SEQ ID NO: 503)
CTGCCCAAGACCATGGGAACCCACCTCTTGCATCAGTGTGACTTG
GATATGAGACCTGGAGTCAAAGGAGGTCATTTTGGAGCTTTAAAA
TTTGATTGCCTTGCTGGATTTTGGACTTGCCTGGGCCCTGAAACT
CCTTTGTTTTGGCCAATTTCTCCTGGAATGGCTGTATGTACCTAA
TACCTGTACCCGCATTGTATCTAGGAAGTAACTGACTTGTTTTTT
ATTTTACAGGCTCATGGGTGGAAGGGACTTGACTTGTCTCAGATG
AGACTTTGGACTGTGGACTTTTGGATTAATTCTGAAATGAGTAAA
GACTTTGGGGGACTTTTGGGAGGGCATGATTGGTTTTGAAATGTG
AGGACCTGAGATTGGGAGGGGCCAGGGGCGGAATGATAATGATTT
GGCTGTGTCTCTATTCAAATCTCAACTAACTTATATCTCCCAGAA
TTCCCACATGTTGTGGGAGGGACTTAGGGGGAGGGAATTGAATCA
TAAG

[0560] In some embodiments, the intronic domain that promotes trans-splicing primarily in the liver comprises or consists of sequences from the gene FGGY. In some embodiments, the sequences from gene FGGY comprise or consist of:

(SEQ ID NO: 504)
TAAGTCAAATTAAACATCCTATTCTTCCCAGTCTCAGGTTTGTCT
TTATCAGCAGCATAAAAATGGACTAATGCAGTAAGTTAGTAACTT
TCCCCCATATTTTTGTTAGTGGAAAGATAGAATAGTTTTTTTTTG
TTTTAATGGAAAGATAGAATAAGAATCTTGGATTCTTTAAGGCCT
GAACTTAGATGCCAGCAGTGGCTGGGAAGGGCACAGGAAGGTGAT
AGTCCATGATGACGGGTTGATACAGACTTACTTAATATATGTTGA
CTATGTTTTATCCTTATTATGCCTTCTTATGCCTTCTTATGCCTC
TTTCTTTACCCTTCACCTTACAGCCAATCCAAGAGTTGGATATCT
CAAAAAAATTAGGAGGCCTGGGTGCAAATGTTTCCTTTCATTTCT
ACCTTTCCTATACCCCTATTAGGATGTGGAGGTGAACAGATGCCT
GAAAATCTTGAAAAGGTTGTCCATGGGTCCAACTCTATATTAACT
AAAT

[0561] In some embodiments, the intronic domain that promotes trans-splicing primarily in the liver comprises or consists of sequences from the gene LEPR. In some embodiments, the sequences from gene LEPR comprise or consist of:

(SEQ ID NO: 505)
TCTTTCTCCTTCCCCTTCTCTTCCCTCCCCTCCCATTATATAATC
TATGCTGTTATGTTACCTATTTTATCCACTACCCCATCTTTACTG
GAGGTGTTGTTCTAGTGGACTCTCCAGGAACTCCTCTATCCTCCT
ACTTCAATCAGGACTAGGCTTTCTCTAAAATTACTATAAGCCATC
ACTCTAAACTTTCCCTTAACTGGTTTCTGGTTAGTACTGTTTCCT
GGATTCCTTTCCTTCATCTTTCTTAACTACACCCTTAAGTAACCT
CCTAAGAAGTATGCGATAAGTCTCCATCTCTCCATGCCTGAACTG
CCTTTTATTCTGCCCTCCTCGATTGTTAGTTTGGTGGAGTATCAA
TTCTTAGAAATAGCCTTTCCAAGAGAACATTGAGATAATTCCTGC
CTTAACATATAGTATCCAGTGTTGCTTCTGAGCAGTCAGATACTA
TTGTGATTTTTACTCCTCACTGTTTACTTATAATTTCCTTTTTAA
ACAG

[0562] In some embodiments, the intronic domain that promotes trans-splicing primarily in the liver comprises or consists of sequences from the gene LEPR. In some embodiments, the sequences from gene LEPR comprise or consist of:

(SEQ ID NO: 506)
AAAAAAAAAGAAAGAAAAAAAAATTCTCCTCATTTTTGTTGTTTTGAATTT
TCAGTGATGAATCTGGAGTGGTTCTTTTTTTATTTAATGTGGTTATTTTTT
GAAGAGACTTTCAATTCCATGTCTCCTGTCAATTCTAAGAAATTATATTAT
TTCTTTGATAATTTCCTCTCCTCTTGTTTCTTTGTTTCTCTTTCTAGAATC
TGTATGTTGGATGATGGACCCTCTGCGTAGATCTTCCACATCTCTTACCTT
TTATCTCATATTTTCGGTTTCTTTGTTTTGTGTGTGTGTGTGTGTGTGTTA
TATTCTGAGACCTTGCCATACCCTCTTCTTCCAGTGCTTCTGTTGGATTTT
TATATACTATTATTTTTGTAAATTTCCAAGTATTCTTTCTCAGAGTATTCT
GTTCTGGTTTTATGCATATTTTCTTAAATGTTGCTAGAAATACCAATTCGA
GGATTTTTGTTCTTTTATTTTAAAAATTCTTTTTTCTTCT

[0563] In some embodiments, the intronic domain that promotes trans-splicing primarily in the liver comprises or consists of sequences from the gene GBP7. In some embodiments, the sequences from gene GBP7 comprise or consist of:

(SEQ ID NO: 507)
AAAGAAAAACTATGAGGTTCTTGCTTCAATTTATCATGGGCTTGAAAGAAC
AGTTTGACAGGGCACTGAGCTGGCAAGGGTTTGAGGATATTGTCAGTGTCT
CATATTTGCTAGTGAGAGTGTGAACTGTTGGAATCATATATGAAATATTTA
AGTGCACATACCTTTGATCTAGCATTTCCACATTTAGAAATCTATCATATA
GATTGATTTACTCAAATTGAAAATGGTATATATAAAATAGTACTTATGTTG
CAGCATTGTTGTAATGCCAAAAGACTGAAAAAAACATTAAAGCCCCTCTTT
CAGGTACTGATAAGGGAAATCTTGGGAAACACTCATAAAGGAATACTCTAC
AGCCACTAAAATGAAGGGAGAAGCTCTATTTGAACTAACAATGACAAGTCT
CCAAGATGTATCATAAGTAAAAAAAAAAAATGATGCACGAAGCATGTATAA
TTACTACCACTGAATTTAGAAAATAATAAATGTATGCATA

[0564] In some embodiments, the intronic domain that promotes trans-splicing primarily in the liver comprises or consists of sequences from the gene GBP7. In some embodiments, the sequences from gene GBP7 comprise or consist of:

(SEQ ID NO: 508)
GAAAGTATCAGATTTGGCTTGATATGAAATGATACTGAATGATCTCAAATT
GCTCCATTTGTTTCTGTATCTGCCTGACTCATCCTATACAACTAGAGTAAA
ACATATTCCTTGTCCCAAACTGGAGCTTGACAACCAGTGTTTTATACAGGG
TCAGCAGTCCCCATTATTTGCTAGATGAGCATGGCCTTGCTATATCGGTGG
AAAGGGGAATCAATTAGAATTAAATCTGCATTCCCTCTCAAAGGGCATTCA
TTGTGCTGGAACAAAATTCCTCCCCACCTCCAGTGAGATGGTGCTGAGGAA
ATGTCACAAAGGTGTATATCATGGATACTCCCCTTATTTAGGTCCAGTCAT
CTGGAAATGTCAGACCAACTCATCAAAGATTTTCTAAGATGTTAGAGAAAT
GGACACATGTTTAACTAATGAAATTGTTAAATACAAACCTCGGTCTCTTAA
AAATTGGGGATTTTCAAAAGTAGGCTCTTTTACTTTTATA

[0565] In some embodiments, the intronic domain that promotes trans-splicing primarily in the liver comprises or consists of sequences from the gene ENSA. In some embodiments, the sequences from gene ENSA comprise or consist of:

(SEQ ID NO: 509)
GTGGGTGAAACATCCCTGTGGAGGATCCCAGTTATTGAGTCTTAGTCACAG
ATGATAATGTGATGCTGATTTGCATTTACCTTGCTGGAGGCAAGGCAGGCG
TGGGCAGGCTGTCACAGTCATGGAACATGTGTGGGAGCTGTGAGAGTCAGA
AGGAAAATACATTATCCTCATGAACAGGCCCAGTTTCTATTCCTGGTCTGG
GAGAATAATCATTTTGAGGTTGTTGGCTTGTGGTTGATCTCCTGGTGGCTA
GGATAGCCCCATATTTATCCTTCTCTATATCTTATTCATTTCTGTTTCTCC
AGTTCCAGGCTATTGCCCTGTACCCAGTAAGGTCCTCAGTTACCCTTTATG
AATAAGTGATTTTGGTGGAACGATCCTCTACTGAGTGGAGTACAAAGGATG
GCAGGGGCTATCCCTTGACTCCAAAACTATATACTCTAGCTGGGAAATTGC
TTATGTACCTGAAAAAGTCAGAACACACTGGGGAGAAGAC

[0566] In some embodiments, the intronic domain that promotes trans-splicing primarily in the liver comprises or consists of sequences from the gene ENSA. In some embodiments, the sequences from gene ENSA comprise or consist of:

(SEQ ID NO: 510)
GAAGTGAGCACCAGCCATTAATTATACTCCTGCAGCAAATGTATTTTTCTT
GTTCAGAGTGGTCCTCCTTACCAAGAGAGAGTCTACTTTCATAGCCATGTA
GCTCCTGATCAGATTTTTAGTTCCCAAAGGTACCTAAAGCTGACTGAGGGA
TTATATTATCGTTTTTTAAAAAAAAAATTTGGCCAGGCGCAGTGGCTCACG
CCTGTAATCCCAGCACTTTGGGAGGCCGAGGCGGGCGGAGCACGAGGTCAG
GAGATCGAGACCATAGTGAAACCCCGTCTCTATTAATAATACAAACACTTA
GCCGGGTGTGGTGGCGGGCGCCTGTAGTCCCAGCTACTCGGGAGGCTGAAG
CAGGAGAATGGCGTGAACCCGGGAGGCGGAGCTTGCAGTGAGCCGAGATCG
TGCCACTGCACTCCAGCCTGGGCAACATAGCGAGGCTCCATCTCAAAAAAA
AATTTTTTTATTTTCCTTACTCTCCTCTGCAATGACTGTA

[0567] In some embodiments, the intronic domain that promotes trans-splicing primarily in the liver comprises or consists of sequences from the gene SLC39A1. In some embodiments, the sequences from gene SLC39A1 comprise or consist of:

(SEQ ID NO: 511)
GTGGCCCACGAAGCTACCCAAGACATCTCTGCACAGCCCTAGCCTTTTTGG
CTTCACCCACTCCGTTCGGGAGTTGGGGACCCGGCCTCTACATTCCTTAGG
GGAACTCCAGCTCCAGGTCCTATTTGGAGGCGGCTCCTAGTTTCCTAGTTT
TCTGGGGGCACCAGGTGAAAGGGTGATGAGATATCCATACAGCCTTTCTCA
TGCCTCGGTTTCCCCCGTGCAGTCTCCCTGAATAAGTCACTTGGGAAAGAA
AGTGTGAGAAGAGAGGAATGTTCCTGGTACAGGAGTAGATGAGTCACCCTG
GGTAGGGGAAGGTCACAAAGTGGCTGGGGCCAGGGAGCTGCACTCTGCTGA
CCAAGCTTCCCCATTCCTTGCCCCATCTTCCTTTGCATGATTTTTCCCAAC
CACTCTGGTCTGTCTTCCTAGGTCTGAGAGTCACTGGAGCTACCAGAAGCA
TCATGGGGCCCTGGGGAGAGCCAGAGCTCCTGGTGTGGCG

[0568] In some embodiments, the intronic domain that promotes trans-splicing primarily in the liver comprises or consists of sequences from the gene SLC39A1. In some embodiments, the sequences from gene SLC39A1 comprise or consist of:

(SEQ ID NO: 512)
AGACTTGACAATGCGGGGTCTCCCTCTTTTAAAAATATCCATATAATCAAA
GCCTTTGTTGACTGGCCCGCTCCGGCCCCTCAGTCCTCCACAGATGCGCCC
CAGGGCCCCAGCCCCGAGGTCCTTTTCCTAATATCCGCTCTTGCTCTCGCT
CACTCTCCTCAGGTCGCCTGCTCCGCCCGCTCCCGCTCCCGATCTCTGATT
GCTCCTAACTGACGTCACTCCCGGTCTGTCCCCGCCCACTCGGTGCTGCCA
TTGGCAGTCGGTCGTGGGTACGCGGCTCCTGTGGGGGAGGGGGGAGCTATG
GGAGGGGGCGGGAATTCCCGACTCTAGGCCGGAAGCGCGCGGAGACCATGT
AGTGAGACCCTCGCGAGGTGAGTGCGGGCTGTCTGGCAGCGGGGTCCATGT
CGGCTGCCCAGGCCTCCCCGGGCCCGGGAACAGGAGTCCCAGCTCACGCAT
TCTTCATCTGCTTCCCGCGACGCTTGGCGGCCTCGCACCC

[0569] In some embodiments, the intronic domain that promotes trans-splicing primarily in the liver comprises or consists of sequences from the gene RAB13. In some embodiments, the sequences from gene RAB13 comprise or consist of:

(SEQ ID NO: 513)
GTAAGGCTCCTAAATTCTAGTCCCTCAACCCCTGGCTCTGACCCTTCCCCC
GTGCATGTCTCTGTATAGTAACCAAACCTCTCACCTCTCTGAGGCCTTCAG
GTAACTCTTCAACTGCTGCCAGCTCCTCATTTTCTTGGTACCATCGCCTTA
GTCTCCCCAAATCCACAAGAACTCTTCTCTATTTTTCTCTGTTCCCCTCTT
CCCCTACCCCCACCACCTAGAACTCTCTCGATCCTATCTCCATGTTTCCTG
TATCCCTGTCCGCCACATCTTTTTCTCCCGATCCGATGCTAGCCTCTTTCT
GTCTTGCTGAGCTTCAAACTCTCCCACTGTGTCCCCACCTCACCATCTACT
TCCCAGGTTCCCTGCCCCAGTCTCCCTGCACCTCAGCTGAACAAGGGTTTG
GGAAGGGTGGAACAAGGTGGCTGGGTGTGCTGGAGGGTGGCCCAAGGACTG
TGATCATGAATATGCAGCCAGCTTGGTGAGGAACGTGGAA

[0570] In some embodiments, the intronic domain that promotes trans-splicing primarily in the liver comprises or consists of sequences from the gene RAB13. In some embodiments, the sequences from gene RAB13 comprise or consist of:

(SEQ ID NO: 514)
TCGTCGTGGTTAAACCTCTACTTCCCTTCACCCCAGCCTCTCTGGCCTCAG
AATGGAAGAGTAAGGTCCTAAGAGGGGAGCTACAATTACCGAAAGGCTGTG
GAAAATAGCGAGAGAGACAGGCCGGCCTAAGCTAGGAAGGGAAAACCGAGA
GAACAGAGGCCGGGCTGGCAGCCTTGGCCTGCTCAAAAGGGTGGGCGGGCA
GGGGGTGGAGCCCGGAGGGGTGCCGCCTCTCCTCTTTCCCGGAGCCTGGGC
GGAGAGGGAGGAAAACTTCTTCCTGGCCTGGGCTCCGTGCCGCTCTGTTTG
CCAACCGTCCAGTCCCGCCTACCAGTGCCGGGCGCTCCCCACCCCTCCCCC
GGCTCCCCCGGTGTCCGCCATGGCCAAAGCCTACGACCACCTCTTCAAGTT
GCTGCTGATCGGGGACTCGGGGGTGGGCAAGACTTGTCTGATCATTCGCTT
TGCAGAGGACAACTTCAACAACACTTACATCTCCACCATC

[0571] In some embodiments, the intronic domain that promotes trans-splicing primarily in the liver comprises or consists of sequences from the gene FMO4. In some embodiments, the sequences from gene FMO4 comprise or consist of:

(SEQ ID NO: 515)
CTCCCAACGTGCTGGGGTTATAGGCATGAGCCACTATGACCAGCCTAAAAT
GGGGTCATTTTAAGTGTTTACATCTAACCAACTAATAGCTTTAACACAAAC
ATGCACACACACACACACACACACACACGTACAATGTGGAGGGTATACATA
CAATATAATATAAATTATATTATTTATACAGCAAAAGCAGATGAAGAGAGA
CAGGGCAGGCCAACTGGCACAGGTGCAGGTGTCTGGTGAGTGTGGCGCAGG
CTGACAGCTGGGCCATAGAGGCATCTCTCCTCACAATTCTGGCAGTAGAGT
ACCCTGGTTAAGTGAACTGGGCGGGGAATTTTACCTCCAGAAAATTATTTT
CTGTGCTGCATTTCCATTCTGAGCTTTGACTATCATGTGCTCTGAAGTTAG
AGCAGTGGGAGGCTAGAAATGAGTGGGTGGAGAATTTAAATAAAGGAAAAG
CCACATGTGACTTTAGTGTTGTTTGTGATTTTTCCCACAG

[0572] In some embodiments, the intronic domain that promotes trans-splicing primarily in the liver comprises or consists of sequences from the gene FMO4. In some embodiments, the sequences from gene FMO4 comprise or consist of:

(SEQ ID NO: 516)
TATGAAATGTAGCTTGCTCTAGGGCAAACTTACAGTATATTCTGTTACAAA
AAAAGGATTCAGAGTATAAAAGCCATTCCTAGAGAAGCAGTATGGCAGGTT
GGAAATAACTCTGCATTAGGAATCAGAAGGATACATTTTTAGTCCTAACTC
TGCCACCAATCAGACGTGGCCTTAGACAAGTCATCTGGGGACACCAGGTCT
TTTCAGTGGAACACACAGCCTGGCCCCCTACCAGTGGCAATCCTGTCTTCA
CTTAGTCCAGGAAATCTATTCTGACTTCACTCTCTTCCTACCTCTCAGGCT
GCTCTTTCTCTGTATTTGCTGGTATCGCCTCTTCCTCACTCCCAAAATTTA
GTGAGCTCCAAACTTAGTCCTCAGGCCTCTTCTCATTCCTATTTACACCCA
CTCCCAGGTGGCCTCATCCAGGCCTGTGGCTTTAAATATCATCATATACTC
AGGGCTCCCAAACTGTGTCTCTGACTCAAATCTTTCTCCA

[0573] In some embodiments, the intronic domain that promotes trans-splicing primarily in the liver comprises or consists of sequences from the gene CFHR3. In some embodiments, the sequences from gene CFHR3 comprise or consist of:

(SEQ ID NO: 517)
CAGATGACTATTAGAAAGATTATACCTTTCTACAGTTCTGTTTCTACATTG
TGGGCATAAGAGAAAAATATAAACATAGAATTAAATTAGCAAAATGTGAGT
ACATTTGGAGTGCTTGTAGTCACGGCTTGTCGAATGGGGGAAAGGAGGATA
AGTAACCATGACTCCAATGGAACATGTTAGCATAATCCTTTTTGATATGAA
GTCACTAGGGTGGACACAACATATTTTAGGAAAGAAGAGTTCAGGCTCTAG
AGAAAGACTGCCAGGGTTCACGTTTATCACCTCACCTGATGATCTCTGCTG
TGATGTTGGGGAAGTGCAACTGAACTTATTATATTTTTGAAATGCTAACGT
CAGTATGTAGCACAAGTTAATAACTATTAACTATTTGGATTATTTTATAAT
TTTATTTTATCCTAAACTACTCATTAGGATGCATTTTATTTGCTCATGAAA
GAGAAAATTATGATTGTTAATTGTTTTTTTCTGCTTTCAG

[0574] In some embodiments, the intronic domain that promotes trans-splicing primarily in the liver comprises or consists of sequences from the gene CFHR3. In some embodiments, the sequences from gene CFHR3 comprise or consist of:

(SEQ ID NO: 518)
AAAAAAGAAAAGAGGTTTTGCTAACCCTTTCAGAGCATTGGGAACACAGCC
AGAAGTGCATTAAATGTATATATTAACTTGGGCAATGTTGACACTTTAGGA
TGCTGAAGCCAGGTGCAGTGGCACACGCCTGTAATCCTAGCACTTTGAGAG
GCCAAGCTGGCAATCATCAGAGGTCAAAAGTTCAAGACCAGCCTGTTCAAC
ACGGTGAAACCCTGTCTCTACTAAAAATAGAAAAACTAGCTCGGCATGATG
GCGTGCACCTGTAGTCCCAGCTACTCAGGAGGCTGAGGTGGGAGAATCACT
TTAACCAGTGGGGCAGAGGTTGAACTGAGCCAAGATAGTGCCACTGCACTC
CAGCCTGGGCAATAGAGTGAGACTCTGTCTTAAAAATAAATAAATAGGATG
CTGAAAATTCCTATTTAAGGAAATAATTCTTTTTCTGATTTATTTAAGGCT
ACATTTGTATTTTCTTAATACAAATATTTTGAAAGTTTCT

[0575] In some embodiments, the intronic domain that promotes trans-splicing primarily in the liver comprises or consists of sequences from the gene C4BPB. In some embodiments, the sequences from gene C4BPB comprise or consist of:

(SEQ ID NO: 519)
TGACCTGACAGGAGGTGGAGCTCAGGCAGCAATGTGAGCAAAGCAGAGTGG
CTATAAATACAGCTGAAGCTTTGCTTGCCTGCCCGCTGCTCACTTTCTGCT
GTGTGGCCCAGTTCCTAATAGTCCGTGGACCGGTACCGGTCTGTGGCCCTG
GGGTTGGGGATCCCTGTTATAGAGCAAAGCACATAAGCACAATGCGTGAGA
ATTGGAAAAGTCTCTAAAATTCTTCTAGGCTCCAAAACTAAACAAACAACA
CTGAACAGATCCATTTTCATTGAGATTCTTCTTTTAGTTCATATTTATTAC
TGGGATAATATTAATAAGTATATTTAAGCCAGAAAATATAAATGATTTGCC
ATGTTGAAAACCCAAATCTTTACTTAAGCTAGCCTGGTTCTGAGCCCCCAT
TCAGAGAGCTAACTGCTGCTCACTGGCTTCAGAGTATATAGCTGGGTCTCA
GTCCTTATGTTGTAACTTGTGAAAAATTTTCTTTCTTCAG

[0576] In some embodiments, the intronic domain that promotes trans-splicing primarily in the liver comprises or consists of sequences from the gene C4BPB. In some embodiments, the sequences from gene C4BPB comprise or consist of:

(SEQ ID NO: 520)
TTGGTTTCAGATTTACCTCTTATTGGGCTGAAATTGCCAACAGCAGTTGTA
TAATGCACCATGTGTGTGTGTGTGTGTGTGTGTGTGTGTGTGTGTGTGTAT
GTGTGTGTGTGTGTGTGTGTGTGTTGTTCTCAGAATGTGAAAAGGCCAAAT
GTAGTGGTTGTCTAAGGCCAGAATTAGCAACATATTATTGGAGAATAGAGG
GCTTAATTTCCAGTCTGTAAGGAGAATGGAAAACTCTGATCTCAGCCGAGA
GAGTAACTCGTATTTTAACATGAGACCATGAATTATGAAACCAAAACTAAC
CGCAACTTATGAGGCAAAAATTAACCTTCCATTTTGGAAAAGATGCTTAGA
ATAGTTACATCCTTAAAAATGACCCACTGGGACAGAAGGAGAGCTAGGACC
CAAATTCTCCTCCCAGTCTTGCCCACATCTGGCTTACGGAAACAGGTTTCC
AAAGCTGCAGGAAAATTGCTTACTGCCTCTTGAATGAAAC

[0577] In some embodiments, the intronic domain that promotes trans-splicing primarily in the liver comprises or consists of sequences from the gene EPHX1. In some embodiments, the sequences from gene EPHX1 comprise or consist of:

(SEQ ID NO: 521)
AAGGCGGCAGCGGGGTTGGAAACCCACCCCCACACAGTCAACACC
TGCTGTCACACCAGGCTAATCAAGAACACTTTTCTTTGGTGCATT
AACCACCTGCTATTAAATAAAGGGCTGTTACTAGGTGGCAAAGTA
ACACACTGCAGTAGAGCCTATTTGTAATCTGAGATCAGTGGCTGT
AAGGCACCATCCTTGAGCCAAGCAAGTACTAATATTCTTGTTATC
TTAATTAGAATGCAAGAGATCGTGTTTTTAAAATTCTCTTTGAAT
CTGTCACTTTGCCCTCCTCTTCCTGGGTGATACACCTGGTAGTGC
TGGTGGGGGCCATCATAATGCCCCTTGTCCCAGATTCCCTTCTTT
TAGATGGGACTCGAGCACTGATCATTTCAGCCCTGTATCTCTCAG
GTCAGCGTGGTTCAGTTTGCTGTGCAGAGTCCAGGGGAGATAACC
ACGCTGTGCACACATGAGATTGGCTGACTTGGCAGGACTGTGCAA
TTGT

[0578] In some embodiments, the intronic domain that promotes trans-splicing primarily in the liver comprises or consists of sequences from the gene EPHX1. In some embodiments, the sequences from gene EPHX1 comprise or consist of:

(SEQ ID NO: 522)
TAAGGAGGGTGGTTTGTAAAGTTCACTGGGGAGGGTGATCCCTCT
TTATTGTTCTAATATTATGCTCGCAGCCTCCTTGACAACATCATG
CAAAATGTGTCTTACTAGCTTCTAGTGCATAAAATATTGGTGGAG
CTCTTCGCTGTGCTGGGCCAGTCACCAGTGCTGGGCACTGTGGGT
CAAGGCAGTGCCCAGGACGGGCACAGCCCTGCCTTCCCAAGCTAT
GGTTTATTGTGGTAGGATCTGCCTGCCCAGTGAAGTGTGTTCAGC
TGCTCCTGTTGCTGGGGGAAGCTCTGCTCTCTGCCTTCGGCTGCC
TCCCACACGCTCCCATGTGTCTCCCAGTCCCTAACCCCTAGTCCT
GCTTTCAATACCGCAGGGGCTTTTAGCTGACTTTTCTCCATCTTC
TTAAAGGGCAGGATTTCCTGGCAGAGACATAACGTCTTTCTGGAA
ATGAAAGAAGCTGATGCATGTTTTTTCTTTTCTGAATTACTTAAA
TAAG

[0579] In some embodiments, the intronic domain that promotes trans-splicing primarily in the liver comprises or consists of sequences from the gene RBM34. In some embodiments, the sequences from gene RBM34 comprise or consist of:

(SEQ ID NO: 523)
ATGAAAGCCTGCAATGTACTTTGGAGGGTGGATGGGTGACTTATT
TACTGTGTCAGCAGAATAGACTGAAAAGTTAATACTGATTATCAT
TGCTGGAATCCTAGGCATTCTCTTCCTATGTCCCATCATACACAT
TAGTATGGGAGGTGGGTATGATTGCTGCAAACAGTCTTTGTTCTC
TGAGCACAGACAGATAAAGAATTTATGTCAATTTAATATTAAAAC
TTTATAGAAGTGAGTTGGATTTTACCAGCTCAGCACTCTGAACCA
GTTATAGCCACATTCTTTGGAGCAGGAAATAAGTATCATTTATAT
TTGGTTTTCCCATACATGATTTTTTTTTTTAACTGCATAGGCATA
GTTAGTTGACGTACCATAGTGTACATTTTTGGGCACTATTACATA
ATTAATGTATATTAGAATATAGGAAATGTTTATTCTATTTTTTTT
TTTGAGACAGAGTCTCGCTGTGTCTCACCCAGGCTGGAGTGCAGT
GGTG

[0580] In some embodiments, the intronic domain that promotes trans-splicing primarily in the liver comprises or consists of sequences from the gene RBM34. In some embodiments, the sequences from gene RBM34 comprise or consist of:

(SEQ ID NO: 524)
CCTACTTTCCTGAAATGTTCTTAAAAACTGGCAGTAGGCCGGGTG
CGGTGGCTCATGCCTGTAATCCCAGCACTTGAAGAGGCTGATGTG
GTTGCATCACCTGAGGTCAGGAGTTTGAGACCAGACTGGCCAACA
TGGCGAAACCCCGTCTCTACTAAAAATACGAAAATTAGCTGAGCA
TGGTGGCGGGCGCCTGTAATCCCAGCTACTTGGGAGGCTGAGGTA
TGAGAATCACTTGAAGCCGTGGGGGCGGAGGTTGCAGTGAGCTGA
GATCACACCACTGCACTCCAGCCTGGGCGAAAGTGCAAGACTCTG
TCTCAAAAAAAAAAAAAAAAGCCTGGCAGTAGAGGATTATCAGAC
AATTTTTCTTAATTCCTTTTTGTAGCACTTATTTGATGTTCTGAA
GGTCAGCTAATGTGTATTTTTTTTTTTAATTTTAGAAGCTGAAGT
CGTTTTTTAAAGAGTATGGACAAATAGAATCTGTACGATTTCGTT
CTCT

[0581] In some embodiments, the intronic domain that promotes trans-splicing primarily in the liver comprises or consists of sequences from the gene KMO. In some embodiments, the sequences from gene KMO comprise or consist of:

(SEQ ID NO: 525)
TCATGAAATTTAAATGTAAGACCTTTTTGTCCAGTATAGATAAGT
TCTGAAATAAGGCAAAAGATAAAGTAAAAAATATATATATAAATA
TATAATGTATGTGCATACATTATATATGTGTGCATATACACACAT
GTACACATCTAGATATGTGCATGTGTGTGTACATATATACCAGGT
ATAATTATACCAGCTATGATTCAAGATTTGAGAACATAAGATGTT
CTCTCTGTCTTTTTCCTTACATATACACACACACGCACGTATTCT
GAAATCTTGAAATATACCTGGTATCAAAAACCTACCTAAGGTTGA
GTTTATAAAGACAGAACACAAAGTGTTTTCTAAGACAACTTCTAT
TTTATGTAGCAATAGATGTGCGTATCATCGTGTAGATGCTACTGG
TTTTAATTACTGTGGAAACTATTATAAAGCTGAGTCCGTTTTATA
GGTTTGCTATATGAATGCACTAATCAATCATATATTCTTTTTTCT
GCAG

[0582] In some embodiments, the intronic domain that promotes trans-splicing primarily in the liver comprises or consists of sequences from the gene KMO. In some embodiments, the sequences from gene KMO comprise or consist of:

(SEQ ID NO: 526)
TAGTATAGAATTTTTTATCAACTGTAATTTTGCATTTGTAATTAA
TGTTGTTTATTACTTACATTTGTACTTAGAATGTATCTACCTAAT
TGATCTCTTCATTGTTTAATCCATTTAGTGATTATAGCTTTGAAA
CTTTGGGATTACTGAGGAAAAATCTGAAGGATTTCCAATTATTTA
CTTTGGAAAGGAGATTTAACTTACATGAATGGATAACAAGAGTTT
ATGTGTGGTGGTGCCTGTCATCTCCACTAAAGACAATTTAGGAGG
AAACAGCCCTTCCAGTAAAGCCAAAGAGATTTAGGTTATCTATCA
GGAAGTGATTCAGCCTTTAAGGTCTGTAGTACATTGGAATACGCA
TTATCAAAAGAGAGCATGGGGATGGGCGCAGCGGCTCACACCTGT
AATACCAGCACTTTGGGAGGCCAAAGCGGGAGGATTGCTTGAGCT
CAGGAGTTCAAGACTGATGTGGCCAACATAGCAAGACCTTGCCTC
TACT

[0583] In some embodiments, the intronic domain that promotes trans-splicing primarily in the liver comprises or consists of sequences from the gene RMDN2. In some embodiments, the sequences from gene RMDN2 comprise or consist of:

(SEQ ID NO: 527)
ACTTGTCCTAGGAATATCACCAGTTGTTTTTGTTCTTGAAAAGAA
AAGGATAGAGAAAGAAGACTGAGGAAAATGATTATGTAAAGAAAT
CTGAAAACCATAAAGTATCTCATTGCTTTGTAAGCTTTATGACCA
TGGTAATCAATTTTATTTTAATGGCTAAATGCAAAGGCTATGTTT
CCACCCAAAAGATACTTAAACTGATCAAGTGATTCAAATGTGAAA
CAACCAACCTAAATTCTTAGGGCAGTTTGGTTCATAATATTTGAT
TTATTTAAATATATTCTCTTCACTTGTGGTTACTGTTATTTTAAT
ATTGCCCTGTTATTCTCTCATGTTTTTCTCTCAAATCAGGCTGAA
GAACTATGCCCTGGTTATTCTAATCCCAATTACATGTACTTAGCA
AAGGTAATGAAGACCACTGTTCTGCTTTAAGATCACTTTGAACCT
ATCGCATAAAAACGGATTATGTTTAATATTGGTTATTTCTCATTT
CCAG

[0584] In some embodiments, the intronic domain that promotes trans-splicing primarily in the liver comprises or consists of sequences from the gene RMDN2. In some embodiments, the sequences from gene RMDN2 comprise or consist of:

(SEQ ID NO: 528)
TAAGTCCAGAAAGTGACAGTGAGTGCTGTTGTCTTGTTAGTACTA
TTCGAGCTCAAAACAGGAATAACTCGCTTAGATACATTTGTAGTT
TTCTCTATTCAATTTTATGTATTTATTTTTATTCTACCTTTATTG
AAGTATAATTGACAAAAACTATATGTATACAGCATGATGTTTTGA
TAGACATATACATTATGAAATGACTACCACAATCAAGCTAATTAA
CACATTCATCGCCTCACATAGTTACTTTTTTTATTGTTGAGAACA
TTTGAGATCCACTCTCTTAGCAAATTTCAAATATACAATACAGTA
TTATTAACTACAGTCACATTGCTGTCCTTTAAATCTCCAGAACCT
ATTCATCCTGCATAACTGAAACTGTGTACCCTAGACCAATATCTC
CCCATTTCTCCCACTCTTCCAGCCCCTGACAGCCACCCTTCTACT
CTCTCCTTCTATGATGGAGTTTTCTTTCTTTTTTTTTTTATTATA
CTTT

[0585] In some embodiments, the intronic domain that promotes trans-splicing primarily in the liver comprises or consists of sequences from the gene SPTBN1. In some embodiments, the sequences from gene SPTBN1 comprise or consist of:

(SEQ ID NO: 529)
GCTCGCCGGGCCGCCGCCGCGTGGTTGGCGCCAGCGCACTGGGGC
AGTCGCGCGCGCCCAGGTGCGGGCCGCGTTACCTCAGCAGACGCT
AGAGAGTGAATGAGCCGCGCGGGCCCGGGACCCTTGGGGCTCTTC
ACTCTCCAGGCCGTCCCGTGGGCGCGCTAGCCTTTTCAAGTGATA
GTAATCGGAGACTTTTCCGTTACATGAGGCTCAACAAAAGATTGT
AATTCCAGCAGCTCTGTTTGGGAAGGCACTACCGCGGCGAGTCCA
GGGCCCGGCCGGGGGTCGGCGGCTGCCGGGCGGCTGGGGCGACCG
CGGACCGTGCGGGACCGGTAGGGGGTCGCGGGCCGGCTAGGCTCC
CCCGCGCCCCTCCTCGTGGTATAGCCTGCATTTCTAATACAATGC
TGTTATGCTAATCAGGTGACATCACCGCCCAGCACACGGCGAGTG
GCTCCTGATAAAATTACAAACCGGCGGCCGCCGCGGGCAGCTGGG
AGGA

[0586] In some embodiments, the intronic domain that promotes trans-splicing primarily in the liver comprises or consists of sequences from the gene SPTBN1. In some embodiments, the sequences from gene SPTBN1 comprise or consist of:

(SEQ ID NO: 530)
TAAGCCCCCTCCCAAAGGCCGGGCCTGTCCTGGGTGCCAACGGGG
GTTCTTGGAGGCTTTATTTGTGACCCTAATGAAGACGGGCGGCTT
CACAGCTCGGCCCCAGACCCTGTGGTTGGCTGCGGGCACCCCATT
CACGACTTAGGGAAGGCAGTTGCTCATACTCCACTCCAGAAGAGC
TACCATTTGGAGTCCCTGTCTCTCCAGCACCTTTTTGGCTTTCTA
GGTTGTCAGATAACTGCTGCACACACATTTTCTTTACTTTTAGCT
AACTTTACCTCCTAGTAGATCAGTGCTCATAGACTTATTAGTATG
CAGGTATTTGATTCCGGGTCGCCTCTGGCTCCCAGCCCCCAGCCT
CTTACCTCTGGGAAGCTTTAAAGGTGTAAAGTGCCGTGCTCAGAC
CCAGTCCTGTAGAACAATAGCAAAGGGGAGGAGGGAGGGGTCTTT
TTGTTCCTAAGCCTTTGGTAAATTACAGTTTTTTATTCAGAAGCT
TAAT

[0587] In some embodiments, the intronic domain that promotes trans-splicing primarily in the liver comprises or consists of sequences from the gene NFU1. In some embodiments, the sequences from gene NFU1 comprise or consist of:

(SEQ ID NO: 531)
GTGGGTAGTGCATCTGATGGAGCCGGCGGGTCCGCCCTGTCGCCG
TAGTTGGGGGTGAGCCCTGAGGCTGTCTGTGCGGGAGCTCGGCGC
TTCTGTGGCCTAATCCGGGCGGACTCTCTGGAGCTTCCTCTCAGG
CTCAGAGACCCAGTTCTTGAGTCTCTGCGGTACGGAAGCTTGTAG
AGACTGGCTGTAGAGCCAGAACGGAGGAGCTGTTTTAAAATCGTG
TGCCTCTCCCGCCCCCAGGCCCTCTACCGGGTGCATTCCCTCCTC
TTCTAAACGCAGAATCAGAATGTCACACAGAAGGGAAGAAAATAC
CTTGTCTCGTTTCCTCATTTTCCCAGTAAGGCCCTGAAAGAGGAG
GTGACATGTCCAAGGTTACACAGTTTCTAAGTGATGGAATTCCGA
CGAGAACCAGGACCCCTAGATTCCCTGCACCCACCACCATTAAGC
CCACTCTGTTCCCTTGTTTTTTCCGCCTCCCTGAGCCCTACCTTT
GAGT

[0588] In some embodiments, the intronic domain that promotes trans-splicing primarily in the liver comprises or consists of sequences from the gene NFU1. In some embodiments, the sequences from gene NFU1 comprise or consist of:

(SEQ ID NO: 532)
CGAGAACCTTTTAGAAGGAATGCTCCAGGGAGTCTTTGGGGGCAG
TCACTGAGCTGGGCCTGGAGGCTGAGTAGGGTCCTAGAGGAGGGA
ATGGGTCAGGTTTAGGGGCTGGAAACAGCATTCGCAAGGCAGCAC
CAGCACCAGCTAAAAACCTAGCCAACAGGGAAAACAAAGTACGGA
AACACGCATGCGTTCACAGTGCTGCGTGAATTAACCAAGCGTTGG
CGCAAACGGGAAAGGTTCCCCGGCCTCTCTTGGTCAGGGTGACGC
AGTAGCCTGCAAACCTCGGCGCGTAGGCCACCGCACTTATCCGCA
GCAGGACCGCCCGCAGCCGGTAGGGTGGGCTCTTCCCAGTGCCCG
CCCAGCTACCGGCCAGCCTGCGGCTGCGCAGATCTTTCGTGGTTC
TGTCAGGGAGACCCTTAGGCACTCCGGACTAAGATGGCGGCGACG
GCCAGGCGGGGCTGGGGAGCTGCGGCTGTTGCCGCCGGGCTGCGC
AGGC

[0589] In some embodiments, the intronic domain that promotes trans-splicing primarily in the liver comprises or consists of sequences from the gene PCBP1-AS1. In some embodiments, the sequences from gene PCBP1-AS1 comprise or consist of:

(SEQ ID NO: 533)
GTTGGTTGAGGGGTTTAACAAGGCTAAGAAGGTGAGTCAGGTTTA
GACTTTGGAAGTTGAACCACAGGATTTATGCTACATACAGAGGAA
TGATTGTTGCTTCCTCTTATGTTAAGTTGGTATGTCACGTAAAAC
CTTTCAGAGTGCTTTCACGTTACTTGTTTAATCATCACAGACAAC
TTTGCCAGTAGGGTCTTATGCCCATTTTACAGAAGAGCCATTTTT
GGATTAGAGGAGTGAAGTGACTTGCCCAACGTTACACAGCCTGTT
AGAATTTGAGCTGAACCTCTTGACTCTTAGTTATGGATTACACCT
TTCCATGGCTTCTGATGCTTTTGATATGGACTTTGATGTGTGGGA
TAGCTTTACCTTAAACTCAAAAGGCTTTCTAGCCAGTTACTATTT
TTCTGTCCCCAAACAGCCAATGCATTTACCTTAAGTTCCTAACTC
TTGTTTTAGAAAATCTCTTCCCTCTTTTCCCTGATGTTTACATTT
ATGG

[0590] In some embodiments, the intronic domain that promotes trans-splicing primarily in the liver comprises or consists of sequences from the gene PCBP1-AS1. In some embodiments, the sequences from gene PCBP1-AS1 comprise or consist of:

(SEQ ID NO: 534)
CTACCTACTGAAATATTTCCATAATTTCCTGTTATGTACTCCTGG
GACTTAGTGCACCTCCTCAGTGAAGCCTTCCCTTTCCCAGCTTCC
CCAGCTCTTAGCCTCCCTCCTTCCCCGAGAGTCTTAACAGTTTCT
CCCTTCGGTAGCCCACGTTTGGACGTTGGTTAAATTGTAATGTGT
CTTGGGGTTGGTAACATGTCATACAGACACCTTGGGTGATGCTGT
GGTCTGGCAAAGAGGTCATTGGACCTTGGAATCTGAGGCTCTGGG
CCCTAGTCCTAGCTCTGCCCCTGTCTAGCTCTGAGACTTCTACAA
CTCATCTGTCAGGGTTTCAGTTCTCCCTTTTATAAAGCAAGAGAT
TAAATGATCTCTAAGGGTCCTTCTACTTATGTCCAGGGACTGATG
ATATTTGATGACTTTGGTTATTTTTCTTTGGCGGGGTGGGAGGTT
TATGTAAATGTTTTCTGCACTTTTGGTAAAATCTCCACTCCCTTC
CTCA

[0591] In some embodiments, the intronic domain that promotes trans-splicing primarily in the liver comprises or consists of sequences from the gene IL1R1. In some embodiments, the sequences from gene IL1R1 comprise or consist of:

(SEQ ID NO: 535)
TCCTTAAGTGAAAAATCTGTGAGGAGTTTTCTATCTTTCTAAGTC
TTTGTGGCACACTTATCACATGCATAGTACTATTTCTCAAGTTAC
CCAGGCACACACAGATGTATGGCTTTCAGGAAGCCATACATCTGT
GTAGCTCTGAGGCCCAGCCTTGTTCAACACTTCACTCAGAAGAAT
TGCTGGCCTGATGACCAACAATAATTGTCAACAACTTAAAACTTC
ATTGACGGCTCCTAAAAAAAATCAGTGTGCATGTGTGTGTGTATG
TGTGTGTGCGTGTGTGTGTGTGTGTGTGTATGAGTGTGTGTATAA
CATTCATTACTGCAAACTGGAATGGAGTGGGGCTGGAAGGCAGCC
CAGAAGCAAGGCTCAGAGCCTGGAGCTGCTGACCTCTTGGGGACA
CTGCAGCCCTGGCCTGGCCTACTTTTCTCTTCTCCCATATCTGGA
AAATGAAAGTAGCCTGACGTATCCGGGGACCCGGCCCAAGACTCC
ACCC

[0592] In some embodiments, the intronic domain that promotes trans-splicing primarily in the liver comprises or consists of sequences from the gene IL1R1. In some embodiments, the sequences from gene IL1R1 comprise or consist of:

(SEQ ID NO: 536)
TAAGGTTTTAAAGGGCCCGCCCTGGCTTCCTTGGGCCTGTAGTTT
GTGACTGTGTCGTTTTCAGAGTGGGAAGGCCCAGAGTTGGCCCCA
TGGAATTCTTTCTGCTTCTAGGGTGTTTGAAGAGATAGAAAGCCA
GGGTAAGGTTCACCGAACCTCCAAGCAAAAATAAATTTCCAGAAG
GGGCCCCTTTACTCTGAGGACATTGAATAGCAACAAAAACTACCA
CTGAAGAGTCATTTTGTCCCAGGCCCTGTGCTGGAAACTTTGAAC
ACCTGTGTTCACCCCTCCCTCATGACACTCATGAAGATATACCAT
GGCTGTCTTTATTTTCTAGGTGGGAATCTCAGGCTTGAGGGTTGG
GGTGGCTTGGGGAAGGTGTGTATCTAAGAGGTAGCTCTTATTTAT
TTTTACTTCTAGAGATTAAGACACATTCTTTTTCAAGATAGACAT
GGAACTGTCAAAAAGGATTAAAAGTTAAATAAGGATAAGGTTATG
TAAA

[0593] In some embodiments, the intronic domain that promotes trans-splicing primarily in the liver comprises or consists of sequences from the gene DBI. In some embodiments, the sequences from gene DBI comprise or consist of:

(SEQ ID NO: 537)
AGCGCGTGCACAGCCAGGCTGCGAAGGTGCAGCGGGCGGGAGGCC
CGTTGGGGGCTCAGCCGGCTGCCAGAAGCTCTCGGGCTCTTTCCT
TCCGTGCCCCTCACTTGCTCATGGGCCCATGCCTAGCCCTGATTC
GTTGGACAGAGCCTTGTGAGCGGGATTTTCCGTTTGGGGATTTCT
AAATCTGCTGCCCACCCCGCAACTGCCGGAAAGTTGCCCATGGGG
TGGACTTCGCTGTGTAGCGGGAGAGGGGTGGGAGTCGAGGGTGCT
TGATGGAGAGATGGGGGAAGGGGTTGCACGGATTGGAGGAGCGAG
GAGACTCAGTCCCCATCCCGAAGCACAGGGCAGGACGTCGCGGCG
GAGTGGGGAAGCGAGGAGTCCGTGGCCGAGAGCTTGGAGGTCAGG
GGAAGTACGGGGCCGGCTGCTCAGAGTGCGGGACGAGGAGAATCG
CGGCCCGGGGAGAGGTGACCCAGGGGCCCCTCCCTTCTCTCCAGT
GTAG

[0594] In some embodiments, the intronic domain that promotes trans-splicing primarily in the liver comprises or consists of sequences from the gene DBI. In some embodiments, the sequences from gene DBI comprise or consist of:

(SEQ ID NO: 538)
TCGGTGTTGAACGCGCGGGCCCCAGGGGGAGGGAGGGGACCAACG
GGCTCCGGCGCTGACACCGCGGCACTCATGCCCTGTCCCCTTTCA
GCTGTTTCCAGCATACTGTGCCCCGTCTGTCCTCAGGCCAGGGCT
TCGCTGCAGCCCCGGCCACTCCCTAGTGCCTGGCCCGGTGGTGGC
CAGGCAGTTGGCCGCGCTGCTTCTCCCGCAGAGGGGACCCCCACT
GGGGGCGAAGGCTTGGCCTGCCCTCTTCACTGCTGTATTTCCAGA
CCTGATGCCTGCGTTTGTGAGAGCTCTGGATATATGGTTTTCGAT
TGAATGAGTGAACTGGAGGGGCTTCCCCTTCTTGTGTTGCTGAAT
CTTTCTAGCTGCCCTGTTGGGGCAGGGAGGGGCAGACACACTTCA
GGGGCTGCATTGCCCGAAGGGTGCCACCTTTCCCACCTCTCCATC
CCCGTAACTGGGCTGTCATCAGGCCACAGTAGGATTCTTACCCTC
TCCC

[0595] In some embodiments, the intronic domain that promotes trans-splicing primarily in the liver comprises or consists of sequences from the gene HNMT. In some embodiments, the sequences from gene HNMT comprise or consist of:

(SEQ ID NO: 539)
TCCCTAGAGTTGACTATTGCCTTGATTTTGGTTTCTTTTCTTAGT
TCTCCATGTACCTATTACTATTTTGATCCCCAAGCAGATATATTA
ATCTCCTCTCAATATATGCAAACATATCAAGGAATCTGTTTATTT
TACCCCAAGGGAACAACTTTTCTGAAGCCCTCTGTTCTTTTTTTC
AGTTTAGGAAGATCTGCTTTGGCCTGCTATACAACTATTAAGGAG
GGAATTTATTTCACTTTCTGAGAATCATTTTCTTTCTCCATTATT
TGATTCCCTGATTCTATATCTCATGCCTTTCTTTTCTTTGTTTCC
TCGGTCCTTTGTTTCCTGAACAATTCTTTAAGAACTTTAAGAGTG
AACGAGAGGTAAACTTTTTGAGACTTTGTATGTTTAAAAATCCCT
TGGTTCTATGTTAATCGTTTGACTGGATATAGAACTCTATACTGA
AAATGGTTTTGTATAATAGATCTAAAGGTACTTTTCCACTGTCTT
TTAG

[0596] In some embodiments, the intronic domain that promotes trans-splicing primarily in the liver comprises or consists of sequences from the gene HNMT. In some embodiments, the sequences from gene HNMT comprise or consist of:

(SEQ ID NO: 540)
CCTTGGCATGTGGAATAACTTTTACATTGCTATGTGTTTTGTTTT
CCCTATTTTGAACTTTTTAGAATCTTCTTACGTCTAGTATTCTGA
AATTTTAAAATACTGAGCTGTGAAATGGTTCCTTTTTACCCATTT
TATGGGTACTCCCTGGGCTATTTCAATTGAGATTCAGATCCTTCA
GTTATGCGGAACTTTGGTAATCATTCTTCACCACTGTTTTCTTTT
TCTGGAACTTTTATTCATCAAATACTTCCTGGATTGATTACCTAA
TTTTCTTATATTTCCAGTTTGCTACAACTTTCCTCTTTCAGCCCA
TGTATTAACTTTTTACTATTATATTTTTAATTTCCAAGAATGTTT
TCTATAGCATTCTTTTCATCATTCCCAGATGTAATACCTTCTTAT
TCATTACAAAATGTTCCTCTGCTCTCTCTGCCTCTTTCCATCTCT
GTTTCTTATGTTAGACAGCTCCCCAACCACCTAAAGAGCCTTGGT
TTTC

[0597] In some embodiments, the intronic domain that promotes trans-splicing primarily in the liver comprises or consists of sequences from the gene KYNU. In some embodiments, the sequences from gene KYNU comprise or consist of:

(SEQ ID NO: 541)
GATCTGCCCACCTTGGCATCCCAAAGTGCCAGGATTACAGGCGTG
AGCCACACACCCGGCATGTTTTCTTTTTTTGGAAACAATAACAGG
ATATCAGATTGATAAATGCAATACCAATTTCTGATAATTTATCTT
GCTATATAATACTTCATGGACTTCTTGCACTTTGTGGTGTTTTAT
TAGTCAGGAATAAGGAGAAAACAACTTATAGCTGTGGAAAGAGTA
CAAATTAATTTTTAAAAACTGGAGAATAAATCAAGCAATTCGGCT
TTTGAAGACTTTCACTTGAAAAAACACTTTTTACTTTTTAATTAT
CATTTCTTAATAATAAAAATTATGCTCAAATGCTGCTCTTATGCC
AGATTTTTAAAGAACCTTAATCTGAAAAAAAAAACTATTTTATAA
TGCAAAAGGGCTCACGGTGAAATTTAGATCGGCAATATGAAATTA
CAAATTTATTATTATCGATATGACCTAACTTGTGCCTAACTTGAT
TTAG

[0598] In some embodiments, the intronic domain that promotes trans-splicing primarily in the liver comprises or consists of sequences from the gene KYNU. In some embodiments, the sequences from gene KYNU comprise or consist of:

(SEQ ID NO: 542)
TATGCACGCCATTTACTTCTTCCCACCTTACTCCAAACATCACTC
TACTTAAGAGTGTTCTAATTGCATGACTTGTGAAGTACTTTAGCT
TGTGTCTGAGTAAAACTATTTCAAAAGTTAAAAAAAAAAAGAGTA
AACCTTGGGCCAGGCACGGTGGCTCACGCCTGTAATCCCAGCACT
TGGGAGGCTGGAGCAGGGGGATCACGAGGTCAGGAGTTTGAGACC
AGCCTGACAAAAATGGCGAAACCCCATCTCTACTGAAAATACAAA
AATTAGCTGGGCATGGTGGTGGGCACCTGTAATCCCAGCTATTCG
GGAGGCTGAGGCAGAAGAGTCACTTGAACTCGGGCGGTGGAGATT
GCAGTGAGCCAAGATCGTGCCCCTGCACTCCAGCCTGGGCAACAG
AGCAAGACTCCATCTCAAAAAAAAAAAAGCGAGTAAATCTTACAT
TTTTAAAAGAAAATCTGTAATCTTTTTTGCTTCAGGCATCTCTAT
TTAA

[0599] In some embodiments, the intronic domain that promotes trans-splicing primarily in the liver comprises or consists of sequences from the gene GRB14. In some embodiments, the sequences from gene GRB14 comprise or consist of:

(SEQ ID NO: 543)
GTAAGTTTGGTATTTTTAATTTTGAGTACTTGTGAATTGGATTTC
TCCTATAAGCAGAAATTATTTATTCCATAGCCACAAAGAGTTCTT
GATTTGGGCTTATCATAAAACAGAAGTGACATTGTTCTATAAATG
AGGTCATCACTGTATTCTAACAGTATCTATATTATACCTGGTACA
TAGTGTGTGTCTGGTATTTGTATATAAATGGACAAATAACGGAAT
AGAGTATCTTGTTCTTAACCAGTGATCACTAATATTACCCATTAT
GTCCTGATTCTAGCATCTCAGATATCAATTGATGGGGGAAAATGA
ACTTCTTTTTAAGTGTCAATATTTTGATTTGAACATATGATTTCG
AAGTATGGTTTATATTATGACATTATGTCAAATGTATTTTTTTAG
GTATGATGCAACATGTATTAAGTAAAAAGCTGTTTCTTAAGTGTT
TTGAACACTTATTTTTTTGTGTGTTTACATCCCTATTGTCCTTTC
TCTA

[0600] In some embodiments, the intronic domain that promotes trans-splicing primarily in the liver comprises or consists of sequences from the gene GRB14. In some embodiments, the sequences from gene GRB14 comprise or consist of:

(SEQ ID NO: 544)
AAAAACACTGAGAGAAAAACACTGAAATTGAAAAACACTTTCAAT
TTATTTGAAAGATAACTTTCAAAGAAATTTTCATAACTCAAATGT
GTTTCTTTTTTCCAGAGAAGTATATCAGAGAATTCCCTGGTAGCA
ATGGACTTCTCAGGCCAGAAAAGCAGAGTTATAGAAAATCCCACT
GAAGCCCTTTCAGTTGCGGTTGAAGAAGGACTCGCTTGGAGGGTA
CAAGTAGCTTCACATGCTTCAAAATATTTATGATTTCAGTTTGTT
TCACCTAAAAACTTGAGATTTGTTTTCTCCTTCCTTGCTCAGAAA
AAAGGATGTTTACGCCTGGGCACTCACGGTAGCCCCACTGCCTCT
TCACAGAGCTCTGCCACAAACATGGGTATGTCTGTTCATAGTCAT
TGCCACTGAGTAGACGGATAGACATGGAAAGGACATGTAATGAAA
TTGCAGTCATCTCAAACAAAGCTTTGCATTCATCCATCCTATTTC
TTTA

[0601] In some embodiments, the intronic domain that promotes trans-splicing primarily in the liver comprises or consists of sequences from the gene SPATS2L. In some embodiments, the sequences from gene SPATS2L comprise or consist of:

(SEQ ID NO: 545)
TCAGAAACAGTTATTGGTATTGCCAAAAAAAAAAAAAAAAAAGGA
AGCTAAGAAGTCACCCTTCTAAATAAATAAATAAATAAATAAATA
AATAAAAACCTGAATTGGAGAGCTGCCTGCATTTCACTCTACTGC
CTCTGGAAGAAGAGTGTTATCTAAAGTGCTTCCATCATGAATAAT
GATTGAGAAACTGCTTTTACTCTCCCGACTACTGTACTCCCAGGC
AGAAACCCACGGCTGAAGCCCACGATGCCCATGTGTAACTTGGTT
ATTACACACACGTTTGGAGCCCAGTGTGCAGACCCGCAGCGCAGA
GGAGGCGGCGGAACACCCCGGGTTGGTCGGGTTTCCAAGGGCTGA
CCCGAGCTCCAGCACTTTTTCCGCGCCTGATTTTTCAGGTCATTT
TCGAATGGGCTATCTTTGCTTACATTTTGAGCTTGGATCCTCTCC
AGAAAGCATTACTACCTTCTAAAAGGAAAAACATCTCGTATTTGC
AGAC

[0602] In some embodiments, the intronic domain that promotes trans-splicing primarily in the liver comprises or consists of sequences from the gene SPATS2L. In some embodiments, the sequences from gene SPATS2L comprise or consist of:

(SEQ ID NO: 546)
TAGGAGAAGATGATTCTCTTGCAACACGTGCGGATTGTGACAAAA
TCTTTCATTAACAAGGGGAGTTTCGGTGAAGTGGAGGTTTGGGGA
AAGGCGAGGAAGTCGGTCTGGAGCAAGCAAGCAAAGTGCGGAAGC
TGTACTGGGATTCTTCTAGAAAGTGGGGTGGGAAAGGAGCTAGGG
AGGGCGTGTGGAGGGACGAGATCTGTGTCAGAACGTGCGTGTGAG
CGGATACAAAACCCGAGAGAGGCGTGAGCAGCGCTGTGTTTGCGA
GCGGGAGCGAGGGGCGCCGGCTGGGGTGTGTGCTCCTGGTGAGTG
ACACCGAGGGGAAGGCGGGCGGGTCGGCGGGCGGGGGCAGCCTGC
GAGGGGCGGGAGTGTCCCTGCGTGGGGCGGCCGAGCCGGAGTTGT
GTCAGTGAAGGAATCCAGTCCGGGGGCCGAGCTGGCTGCGCCCTC
CGCTGCAAGCGCCGGCAGCGCGGGGCGAGCTCCGGACGGCGCGCG
GCCC

[0603] In some embodiments, the intronic domain that promotes trans-splicing primarily in the liver comprises or consists of sequences from the gene CPS1. In some embodiments, the sequences from gene CPS1 comprise or consist of:

(SEQ ID NO: 547)
AGGGCTGAGGATCGCTCCATCTTCTCAGCTGTCTTGGATGAGCTG
AAGGTGGCTCAGGCACCTTGGAAAGCTGTTAATACTTTGGTAAGG
AGAGAAACAAGTATCTGTTTCTAATGTTCTATTTTGAAGAGCTGC
AACCTGAATGTTGACTGAATGTTGACTATTGGATATGTTAACTAC
AGGGCAGATAGAATGCATACACTTAGTGAATTTAAAGTTGTTGTA
TATCCATGATTGCAGTTAATGCTGATTATGAGTTGATAGCAGTAT
TCTCATTAAGATTCAGACAATGAAAATAATTTCAAACCAGTTTTG
AACAAGATTTGATATTTAGAATCAGAAGCTAGGAATTTTATGTAT
TTCAGTGTCCAATTTACATTTAATGGTGCCTTTAGAGAATAAAGA
AGCTGGGCTACCACTCGAGCTAATGATACATTCTGTAATTTTATT
GCATATTTTAAACTACTCATACATTTTTATTGTTGTTTCTATTAA
TTAG

[0604] In some embodiments, the intronic domain that promotes trans-splicing primarily in the liver comprises or consists of sequences from the gene CPS1. In some embodiments, the sequences from gene CPS1 comprise or consist of:

(SEQ ID NO: 548)
TAACACTGTATATTGTTTTCCAAAACAATGATTCAAAAATTGGGA
GATACAGAAATGCATGCTGTATGCTAATAGCACTAGGGTTCTATA
TGTAGTAATTTATAAATCCATTAACAATTTCCAAACCATCACAGC
CAGTTTAAGGACCAATGTGTGGTCTTCTAGTTTAATGCTTTCCCT
TCAGGGAGTGGCCATAGGAAGACTACAGTTCTTCATCTAGAAGTG
TAGTGTAAGGCATCTCCTTACCAAACAGAGAGGGTAGCTTTATAT
TAAAGAACAGGACAATTTAAAAAAGACACACAAATTGAGGTATCT
CTCGCCAGCGTGTTTTCTGATACCCAGAAATGACAGCTTATCTTT
GACTATTGTCAGCACCTTCTGATAGTGCCTTTGTTTTAAAATTTT
CAGTTTTTGAGATCCGATTGTTTAATAGATAAATTATAAGGGTGA
GGAACAGGAACAGTGAGGATCTTTTATATTAAACTTTAAAACAAA
GTTT

[0605] In some embodiments, the intronic domain that promotes trans-splicing primarily in the liver comprises or consists of sequences from the gene PECR. In some embodiments, the sequences from gene PECR comprise or consist of:

(SEQ ID NO: 549)
GTAGGTAAACGATCTATATTGAAATTTATTGACAAATTATGCTTT
CTGATTCCATTTGTGATGTTGATAGAGGTATTTGGTAATAAGCAA
GTATAGCATAAAAGATTGACTTTAAAACATAGATAAAATGGAAAG
CCTAATTTTCTTTTTTTTTTTTTTTTTTTTTTGAGATGGAGTCTC
TGTCGCCCAGGCCGGAGTGCAGTGGCATGATCGTGGCTCACTATA
ACTTCCACCTCCAAGGCTCAAGTGATTCTTGTGCCTCAGCCTCCT
AAGTAGCTGGGACTACAGGCACAAGCCACCATGCCCAGCTAATTT
TTTGGATTTTAGTAGAGATGGGTTTTCACCATATTGCCCTGGGTG
GTCTCGAACTCCTGAGCTCAGGAGATCTGTTCGCCATGGCCTCTC
AAAGTGCTGGGATTACAGATGTGAGCCACCGCACCCGGCCCAGAA
GGTCTAATTATCATTATGGAAGTACTCTTTGATTTACAGCCAGAT
TGTC

[0606] In some embodiments, the intronic domain that promotes trans-splicing primarily in the liver comprises or consists of sequences from the gene PECR. In some embodiments, the sequences from gene PECR comprise or consist of:

(SEQ ID NO: 550)
CCCGGTAATTTTTGTATTTTTAGTAGAGATGGGGTTTCACCATGT
TGGCCAGGCTGGTCTTGAACTCTTGACCTCAGGTGATCCGCCCGC
CTTGGCCTCCCAAAGTGCTAGGATTATAGGTGTGAGCCACTGCAC
CTGGCCTCCTTTGTTATTTAAAATCGATGTTAAAAATAACCACAG
GCTTGAAATCCTTAAAATTACCAATGTGTTTTCCTTTGTAATCAA
AGTTCTTTAAAGTATTCCTCTTACGTAGTGATTTGGGGAGCCTTA
TCTGGGTCTATGCCATGTGAGATTTGCTTGATCATCAGCTGTGGC
TTGGATTTAATATTGAAGGACATAGTTTTTTCTTCGTTGTTTAGA
CAGAAGCTCAACAAGACAGACTCCATAGCAAGAAGTCTCTTGTGG
AATTCTGTCAGGTAGTTGGCACACTTGTGAGCTTGATGAACAAGA
GAAATATTCAACAGAAGCTGATTGTCATGTTTATGTTTTGTCTTT
CAAA

[0607] In some embodiments, the intronic domain that promotes trans-splicing primarily in the liver comprises or consists of sequences from the gene SP100. In some embodiments, the sequences from gene SP100 comprise or consist of:

(SEQ ID NO: 551)
GTAGTTATTTTCAAATCTTTTCGAAAGGAAAGAAGGAAGGAAGGAAAGAAA
GACGCAGGAATATGTATAAAGGTATAGCAAACATCACACTTAATGGTGCTG
CTAAGTGCTTCTTCCTTGAAATTGGAAATAAGGCAAGGAAGTCCACTCTCA
TCACTTCTCTTCAACATTGTATTCAAACTCCTAACCAGTGAAATGAGACCA
AAAAATAGAAATAATTGTTTGGAAAGAAACAGTAAGTCAGTCTATTTGTTC
ATGATATAATTATTTTCTTTAAAATACAAAGGAAATCTATAAATAATTTAC
TAGAAATACTACATGAATTTAGCAATGCCATAAATTCATGGTTAATATGTT
TCAAACCAATTATATTTTCATATAATAGTAATAAGGAATTTGAAAAGCATT
ATCATTTAAAGTAACACCAAAACAATAAAATAACTAGGAATAAATTTATTA
TTTTTTAAATTTAATTAAATTAAATTTTTTATTTCAATAG

[0608] In some embodiments, the intronic domain that promotes trans-splicing primarily in the liver comprises or consists of sequences from the gene SP100. In some embodiments, the sequences from gene SP100 comprise or consist of:

(SEQ ID NO: 552)
TAAGTAAATGGAGAGATATACAATGTTAACAGATTGGAAGCTCAATGTTGT
TGTCATCTCCCCCAAATTTATCTGTAGCTTCAATTCAAATCCAAAAAAAAG
TCCTAAAGTTTTTTCTTGAAGAAATTGACAAACTGATTTGAAAAGATAATG
TATAAAAGCAAAGAATCTAGAAAATCCAAGCCAATCTTTTCTAATTGACTT
CAAGACTTTTGTTAAGCCATGATATTTAAGGCAAAATCTTACCAGCATAAG
GGTAGACAAATAGATCAATGGTATAGCATAGAAAGTACATATATAAACCCA
TGCTAATATTGTAAATTGTTTTTTGAATATTTTCATGACCTTGGAGTAGGC
AAATATTTCTTAGATAGTACACTAAAGTCATTAATTATAAAAGAAAAAAAA
ATAAATTGGATTTCATCAAAATTACAGATTTCTTCCCATCAAAAGACATGA
TTAAGAAAATGAAAGAGAAGCTACAGACTGGGTGAAAATA

[0609] In some embodiments, the intronic domain that promotes trans-splicing primarily in the liver comprises or consists of sequences from the gene TRPM8. In some embodiments, the sequences from gene TRPM8 comprise or consist of:

(SEQ ID NO: 553)
CTTACTTTAAGGAAGGTCCCTGGAAGTTGTTCATTTCCTGCATAATAGTCC
GTTGATTCTTGCATTTGCTGCACTTACGTTCTAGTTCATTAAAAGAATCTA
GGCTGTTCCTTGGGGGACTCATCAAAAACCCACATTTTTATGTTATTTCAG
TTTTAATTCAGTTTTTAAAAATTTATGCAGAAACCACTGAGCAAATAAAAT
GCTCAGAAACATTCTGGGTTTTAACCTAGATTGAATGAGTTTGAATGAGTT
GAGCCTTGATCATTCAACCTTAGTCACGCAGCTCACACCGATAAACTGGTC
AGAATACACATCTTTAAGAGAAAAAAACATTCTCAGAGCTGCTTCTATAAA
AAAAAAAATCTCTCAACTTTGGTGGTATATTTGGATCTATTCCCAGTATAT
TCCCAGTATATTTTGAAGCAAACCATATCCTGCCTGAGAATGGAAGTGGGA
AATCTATTCTTAACACAGTGTTCTTTCTTTGTTTTTACAG

[0610] In some embodiments, the intronic domain that promotes trans-splicing primarily in the liver comprises or consists of sequences from the gene TRPM8. In some embodiments, the sequences from gene TRPM8 comprise or consist of:

(SEQ ID NO: 554)
GTGTTGCTTTTGTCATTTTATTGAGAGTGACAAAATAAAATTCCTTAATTC
GGTCAGATTCACTTCTATAGGGATTTGGTTCCCAGAGTTACATGAACTGAC
TTCTCTAAGCAGATGACTAGAGCATTCTGATTAAATGCAAGCAAATGAATT
CCCCCCTCTGGTTCTGGTTCTTGTCAACATGGCCAGATCTGAATTCTGTGG
CCCACTTTTTGGTTTCCCCCAAGTCAGGCATCCATCTGTAGCCCCGGGGAC
TCCAGATTCATTGACTCAGAGCCACCCCAATGTGTCATGGGGCTTTTTTGA
GGCCTCATGTGGGCTCACAAACAGGTGCTCCTGCTCTATGTTGGGGTCAAC
ACGAATGTTGATTGTCCACAAACCACTTGACAATGGAGCTTCGGGCCCAGC
AAAGGACATGATTCCCTTGTTGTAGGCATTGTCTCCAGAGTGTTCCTGGGC
CCTCCTGCTCCAAACACACATTCATTCCAGGAAGAATCTG

[0611] In some embodiments, the intronic domain that promotes trans-splicing primarily in the liver comprises or consists of sequences from the gene SEPT2. In some embodiments, the sequences from gene SEPT2 comprise or consist of:

(SEQ ID NO: 555)
AGTACATTCCTCACATTTGTGAACAGTTATGTTTCTAATTATATGATGTTC
AAGTTCTGTAGTCTCATAGACCTGGATTCAAATCTTGGCCCTGCTCTGGAT
AGTACTCTGACCTTGGGCAAATTAGAGTTTCTTTGAGTACCCTCAAAGATC
ATACTGCAAACATAGTAGTACTGTAGGTACTAAACACAGAATGATGTTTGT
GAGGTACTTAGCCCAGTACCAGGCCTTATGTAAACACTTAACCGATTGAAT
GGTGTCATATGAATAAGGTCATGACAAGGTTTTTCTTTTTATTTAAAGGTG
AATCAGGTCTAGGAAAATCGACTCTCATAAACAGCCTATTCCTAACTGATC
TGTACCCAGAAAGAGTCATACCTGGAGCAGCAGGTAAAAACATTCTTATGT
TACTGTAAGTGTAATTCTACATGAAAGATGCTGAAGACTGCCTAATTAATA
TTTTATGTCTTAGCTGTGTGTTTTGTTTGTTCTTGTTCAG

[0612] In some embodiments, the intronic domain that promotes trans-splicing primarily in the liver comprises or consists of sequences from the gene SEPT2. In some embodiments, the sequences from gene SEPT2 comprise or consist of:

(SEQ ID NO: 556)
TAGGTGTGCTGCACCGAGGTCCTTGGATTTGGGTTGTAGACTTTCTTTGAC
ACGTATCCATGGATCCATCCTCTCTTGAGTTTGTCTGTAAAATGTAATAAG
TAGTTTCTGCCTATATTAAATATTTGATGGAAGGATTAAGTGAGAATGTTT
TACATCAAAAATGCTGTGTAACTAGAAGATTACTAGGATAGATGTTCGAAT
TCATCTACTGTCAGAAAGTTCCAGCACAGGACACCAGCATCCACAAATGAC
TGTTGAATGAAATAGGCACACATAGTGAGAGCCTAAGACTTGGGCTGCTGC
AAGAATATGTAGCCCTTTCAGAATATTTTTGAATTCAGTTTTTAAATGAAT
TCGTAAATTGCTTTCTTTTTCCCAGGAACAGAAATTATAATTTTTAACATT
TGTGTTTTTAACCTTCCCCAGTAGCACAATAATCTTAGCTTTAACCTTCCC
CTTTCTGACTTCTCTGGGATCTTTTTTTCTTAATCCCCAT

[0613] In some embodiments, the intronic domain that promotes trans-splicing primarily in the liver comprises or consists of sequences from the gene RPL15. In some embodiments, the sequences from gene RPL15 comprise or consist of:

(SEQ ID NO: 557)
CAGAGACTCCGCAGGGGGAGAGCCCGCGGTGCGTGAAACAAACCTGTTCTC
TCCTCAGACCTCAAAGACAGCGGCTCCACCGCGGTACGCGGCCACCGGCTT
TGGAGCCTGGACCCCAACTTGCCTCCTCTCGCGGAGAGACAGTCGCCGACG
CTCGCTTAGCCGCCGAGACCTCGCCGCCAACTCTCTCACCTCTCGAGACGC
CCAGGCCGCTCAGGCTCGAATCTTGCGGAGCAGGGGGCGGGACAATAGCGG
CCGCGGCGCCCCACTCGGCAGAACTCCGCCACCAGGCGCGATGCCGGAACT
ACATGTCCCATGACGCTCTGGGAGGCCGCAGCTTTCCACCGGAAAGAGGGT
GGCTGAGGTGGGGGAGGAGCCCAAAAGGCATTGTGGGAGTACAGCTCTTTC
CTTTCCGTCTGGCGGCAGCCATCAGGTAGGCTGCGTTGAGGATCTTTGCTC
TTCCATCCGCCTTTGATCGTCTTCCTCTTCAGCCATCCAG

[0614] In some embodiments, the intronic domain that promotes trans-splicing primarily in the liver comprises or consists of sequences from the gene RPL15. In some embodiments, the sequences from gene RPL15 comprise or consist of:

(SEQ ID NO: 558)
TCAGGATGCGGGACAGCAAAGGGGTGGAGAGGCGGCCCCCGGGGCGGGTTG
AGCGAAGATGTGATGGCGGCGCGAATTCGAGCTGGGCCCGGATCCTGGAGG
AGGCGTGGGGCTGACGAATGGGGCGCCCGGGACAAGGCAGCCTAAAGTGAG
GCTGCTGGTTGGGTGGGGTAGATGCATTTTCCTCGAGAGTTAATCCTCGGT
GGCCGCAGCAGTACCTTGTCCTGTGATGTCAGCGGCATCTCCTTTCAGGTC
CTCCTTGGGGACGCCGCCTGCCGCAGCCACCCGCCCCCTTGGTGCTCAGTT
CTGGTTCTGTTAATTCGCCCCACCAAAACGTGCCGAGCACCGCTCTGTGCT
GGGGTTGCGGAAGTGACTGAACGCGGCTCCGTGGGCGCAGTGGTGGGGGTT
GGGCTAGCTGTCCCCGGCAGTTGGTGCAGAGCCATTTTCATTCCCGGCGGT
TTCCTTGTTTTTGTTGGGGAACTAAGATGGACGGATACAG

[0615] In some embodiments, the intronic domain that promotes trans-splicing primarily in the liver comprises or consists of sequences from the gene AZ12. In some embodiments, the sequences from gene AZ12 comprise or consist of:

(SEQ ID NO: 559)
GTAACGAGCTCTTCTCTTAGGTTTTGGAGTCAGAGTTTGATTTGAATCCTA
CTCTACCCACTCTTCATTCAGTAATCAATATTTATTGAGCAACTTCTACAC
AGTGATGAGTTGGGGACACAAATGATGGGCAAAACAGACAAAGCTTCTGCC
CTCACAGAGCTTAACATTCTTCTAGATTTAACAGGGCTAATTCAACTTTCT
AAGACCTACCTATAAAATATAGATGATACATATTTCATAGAATTGTTCAGA
TAATTAAAAGAGATAATATTAAAAGAATGTAGTGCATTATAGTGGGACATA
TTGGACACTCAAATGTTAATTAATTTGTCTTCTATTCTAAATATACAACAA
ACATAGCCAATTACTGGTATGGAAAGATAGAGTATGCATTAAGACTTCTAT
AATATAATATTAATATGTTGTTGTAATGAATTATACTCAAAGAACTTTTGA
AAATTTATAAATTGAGAAGCTATGAAACTTGCTACTAATA

[0616] In some embodiments, the intronic domain that promotes trans-splicing primarily in the liver comprises or consists of sequences from the gene AZ12. In some embodiments, the sequences from gene AZ12 comprise or consist of:

(SEQ ID NO: 560)
TATTCATGTGATCTGAAATAAGGCAAAAGAAATGTTAAAGGGATTAGTTGA
CACAGGAGGGAGATTAGACATTTTGGAAGAAAGCAGGCATAGTGAAACACG
GGTTGGAAACGTGGCTGTAGTTAAATTGCCTATGTTTACATCTCAACTCTC
CACTTACTATGTTACTTTGGAAAAAATACTTAAATTCCTCCTACCTCAGTT
TCTTCATCTATAATGTTCTTGAACAGTGACTGATATTAGTAAGTAACCAAA
TTTTATTTCAAGCAAGGGATAGTTAAAAACTCACTTTCTAGTAATAATTAC
TGATCTAAGATACATGAAATTCAATTGATAATCTTTATTTAGAGTGCTATA
TTTAGTTTTTTATTTTAAACTAAAAAATATTTAAAAGGACTTTTTAGGTTC
TCTTGCATGGTCTAAAGTCCCTCTTATTCTGTTTTTCCCAGGAGGTCTTAA
AAGGTTTTAGCCACAGTTTCTCCTTCCATCATGTTTTTCA

[0617] In some embodiments, the intronic domain that promotes trans-splicing primarily in the liver comprises or consists of sequences from the gene IP6K2. In some embodiments, the sequences from gene IP6K2 comprise or consist of:

(SEQ ID NO: 561)
GTAAGAATCCATTAAAGAAATTAATTTTAAATGTGCATTACCTGGTTACAT
AAAGGACTCTAGAACAACTTAGGTTCTTTTGGGACTGTTGAAACATTGTCT
TTAAGGACAGAATGTACTGGGTGCCTTTCTCTGTACTCTGAATATGCATGT
GTATTGCGGTGGGGATGGGGGAGTTGGGGGCCCTCACTTGGTCCTTCTCTG
TTGTTTTTTTCCAGGACAAAGCCAAAGGCCCCTTGTTAGCTGGCCATCCCT
GCCCCATTTTTTCCCCTGGTCCTTTCCCCTGTGGCCACAGGGAAGTGTGGC
CTGAATACCCCACCCCGGCTCCTCTGCACCCAGAGCTGGGGGCCACCTCAG
AAGTGTCATCTCTCTCTGAGCACGCATTCCCCTGCAGCAGTCGAGGACTGA
GCAGATTGAGTGATGCTGGGGCAGAGAGGCCTGGGAGGAAAGGTGTTCAGC
CAGTCGTTTGTAAGGCGCTCGTCGGCACCTGCTGAAACGC

[0618] In some embodiments, the intronic domain that promotes trans-splicing primarily in the liver comprises or consists of sequences from the gene IP6K2. In some embodiments, the sequences from gene IP6K2 comprise or consist of:

(SEQ ID NO: 562)
AAGGCCCTGGCAGCCATCCCTGGAGCCCTCACTCCCTCCCACTCTGTGCTT
TCCCTCCCTCTCCTCCTTCTCCTCCTCCTGGCCCTCAGCCCAGCATCTCAC
ACCCTCAGTTTTCAATCCCTGGTAAGATTGCTCAATTCTGTTTTGTTGTGT
GGATTTGAGTTTGATTTTGGTAGAAGTGTAGTTGTGTTTTATGTTCAGGTG
TCTCTTGATCACAGTAACCCATAGTCCCCCACTGGGGGGACGGTGGGGGAA
GACTTTGGGAGGATTTTACCCAGAATACTTGCCGCCTGCTTTTTGTCCTCC
AGGAAACCAGAAGCCCGGGTAATTAGGTAGGCCGGGGAGCAGCGTTGAGTC
AGATGGAATGCAGGAGTGGGAGGCCTGTGCTGATTAGCCCAAGCCCTTTGC
TGTTACAGAATGTCCCCAAAATTGCTATATGAAAGCAACCCTTCGATTCAC
ATATGATAATTTTTTATTTCTTTTTATAATGTATTTTATA

[0619] In some embodiments, the intronic domain that promotes trans-splicing primarily in the liver comprises or consists of sequences from the gene MST1. In some embodiments, the sequences from gene MST1 comprise or consist of:

(SEQ ID NO: 563)
GTGAGCACTAGTGACGCTTCCCCCATGACCCTGCCTCAGCCCCCACCCAAA
GGCTGGCTCCCTTAACCCCAGTGAACTTTGTCTTTCAGCTGATGACCAGCC
GCCATCAATCCTGGACCCCCCAGGTTAGGAGTTGGGCCAGTTATGGGTCAG
GCCCTTTAGCCCACGACATCCACACAGTCTGGGTTTCATCCAGCCCACCCC
ATCCTACAGACCAGGTGCAGTTTGAGAAGTGTGGCAAGAGGGTGGATCGGC
TGGATCAGCGGCGTTCCAAGCTGCGCGTGGTTGGGGGCCATCCGGGCAACT
CACCCTGGACAGTCAGCTTGCGGAATCGGTGAGGCACAACTGCCTGTCTCC
CACAGAGAGGAGCTGAGGTTGTGTCCTCTGTGGTTATCCCACTGGGGGCTG
GGAATCTATCCCTGCCCCCAGAGGTCCTAGCCAGAAGATGGCAGGTCTAGC
ATCTGTCCCAGGAGTCTGTTACCTGTCCTAATTCCCCACT

[0620] In some embodiments, the intronic domain that promotes trans-splicing primarily in the liver comprises or consists of sequences from the gene MST1. In some embodiments, the sequences from gene MST1 comprise or consist of:

(SEQ ID NO: 564)
GGAGGCTGGCGGGCTAGGGCTGAGTGGAGCGCCTGCTTAGAGACCTTCGGG
AGAACTTCTGCCGGAACCCCGACGGCTCAGAGGCGCCCTGGTGCTTCACAC
TGCGGCCCGGCATGCGCGCGGCCTTTTGCTACCAGATCCGGCGTTGTACAG
ACGACGTGCGGCCCCAGGGTGAGGCCCAAGCTTGGGGGCTACAGAGCCGGG
CTGGAAGCCTGGAACCGGAGGGCCGGGGCGAGGTCTCGGCCTGATGGCTGC
CCGCACCCGCCACAGACTGCTACCACGGCGCAGGGGAGCAGTACCGCGGCA
CGGTCAGCAAGACCCGCAAGGGTGTCCAGTGCCAGCGCTGGTCCGCTGAGA
CGCCGCACAAGCCGCAGTGAGTCCCTGGTGCTCCCGGCCCCGCCAGGGCCC
TAACCCTGGGGCGGCATGCTTTGGTGTCTGGGACCAGAGCCTGGAAATGGT
TGAGACTACCCTGCCACGATTTTGCTCCCGCTTCCGCCTA

[0621] In some embodiments, the intronic domain that promotes trans-splicing primarily in the liver comprises or consists of sequences from the gene ITIH3. In some embodiments, the sequences from gene ITIH3 comprise or consist of:

(SEQ ID NO: 565)
ACATCCCATTGCCACCAGCCCCATAAAGGGCTTCCCTGGACGTGCCCGATT
TCCAAAGCCTAATCTTTGTAGTCACATCTCCACCTCTATCTGCCAGTGTTG
GGGCCCCTCTGGGGCCCAGCAGCGCTAAGACAGGAGGAAGGCACGGGGCTG
GGGGAGAAGGAACCCCTAGACCCTGCTCACCACTGCCCTTCGGCTTTTCAG
CCACACCGGTGAGCCCCGCCATGTCCTACCTGAGTGAGTACATGCTGGCAG
CTGCCACTCCTCCCACTGCTTAGAGCCTGCCCCTGCCACATGTCCCTCCAC
CGTGGCTACTCACTCAGCTCTCCGGGATGGGCAGATGGACAATGTGCCCTG
AGGAGATTGCGGGGTGGGAGGGCAATGGCATTAGCGAGCGGGAAGGGGAGG
GGAGGGGCATAAGCTGAACTCCTATGGGGGTCGTCGGGCGCCTCCCAGGGC
CACTTGCTTAGCTCAGCCCTCTCTCCCTTTGTATCTGCAG

[0622] In some embodiments, the intronic domain that promotes trans-splicing primarily in the liver comprises or consists of sequences from the gene ITIH3. In some embodiments, the sequences from gene ITIH3 comprise or consist of:

(SEQ ID NO: 566)
TGAGTCCCTGGCTGCTCCTCGGGAAGGCTCAGGGGCCTGGGCACGTGCTC
CTGCCTGTCTCGGAGTCGAGCCCATGGAGGCCAGAAGGCTGGGGGAGGCC
CCAGGTATGATGAGAGGCCCCGGGAGTCAGCTCCTTCTCTAATGTGTCAC
CAGTGGACGGGGATCCCCACTTCATCATCCAAATTCCGGAGAAAGACGAT
GCCCTCTGCTTCAACATCGATGAAGCCCCAGGCACAGTGCTGCGCCTTAT
TCAGGATGCAGTCACAGGTGAGGCTTGTGGGCTAGGGCCGGGGCCAGGGG
GCTCTTCCTGGGAGGGCTTGGGTCCCCCGAGGTAGGCACAGGGAACAGGT
TCTCACTCTGCCCAGTAAGGCATCATCTTCACATGCAAAGAAACCCCTGG
GGGTGGGGAGTGCCCAGGGCCACAGGCTTGCTCAGCCCCACATGCCAGTG
CTATTGGGAGATGATTAGCGTGAATGGACCACCTGGGCCTAGGGTAGGA

[0623] In some embodiments, the intronic domain that promotes trans-splicing primarily in the liver comprises or consists of sequences from the gene ITIH4. In some embodiments, the sequences from gene ITIH4 comprise or consist of:

(SEQ ID NO: 567)
GTGACAAAGTAGGAGGTGGGGGGAGGGGAGATTGACAGATTGGGCTCAGT
CCTGGCTGTGGAGGGTAGTGCCTTGCCCAGCTCCTCTGGCTGGTGACAGC
CCTCGGGCCTCAGTTCAGTTGTATCTGATCAGGACTTGACCACACAGAGG
CTTCCTTTTCTCCAAGAAGAGGATGGAATAGACAAGGTAGTTTGAGGGTT
TCTGCCAGGGGGAGGCATGACATCCCTGGGGGGGAGCTTGAGGGAGGTCC
ATTATTGTTCATCTCCCAGCTGTTGGGGGAGAGGCTCCCCAAGTTGGCCG
GGTGTGGGGAGAGGGGACATAGCTGCCCTCTCCGCACCCACTCCTGGGTG
GATCTCAAGCCCTGGCTGTGAAGACCCACACCCCACCTGAGAGAAGACTG
CATCTGTCGATTTCTCCAAAGCTGGAGCTGCTGGCTCCCGGATGAATTTC
AGACCTGGGGTTCTCAGCTCCAGGCAACTTGGACTCCCAGGACCTCCTG

[0624] In some embodiments, the intronic domain that promotes trans-splicing primarily in the liver comprises or consists of sequences from the gene ITIH4. In some embodiments, the sequences from gene ITIH4 comprise or consist of:

(SEQ ID NO: 568)
TGAGGAAAGTGAAGCCGGGTCTCCTGTCTCCCCAAATTCATTGCACCTAC
GATATAGTCCAGGATTGGGTAGCAAGATTAAACACAAGCGCTTCAAATTG
ATGAAAACCACCCTGACGGTGTCTGTCTGTGTCTCTGTCTGTCTGTCTCT
CTCTCTCTCTTTGTTTTATCCAGAAAGTAGAAACAGGAATGTCCACTCAG
GTAAGCAGCGAACATCCTCAAAGGCTGTGCTGGGTGGTGGTCTGCTAACA
CAGGGTCCAGGGCACCAGCCCTGTGAGGTTGCTGGCCAGGGCCCAGGTCC
ACCCAGGCCTCTCCAGCCCATCCCTGCTGCCAGGAGGCAGTGTAATCTGA
CCCAGCATGCTGGTGCATTTAGTCGCCTGTGCATTCAAATATTGGCTGTG
CCTCAGGCCCTGTCCCCAGCACTAAGAATACAGTCCCCATCCAAGTGGGG
CCACAGGAAGGTGGGTGCAAGATGCAAACCCAGGTCCCACTGATTTCCA

[0625] In some embodiments, the intronic domain that promotes trans-splicing primarily in the liver comprises or consists of sequences from the gene IL17RB. In some embodiments, the sequences from gene IL17RB comprise or consist of:

(SEQ ID NO: 569)
TTTGTGTTAGAAGGGGAACATTTTAAAGAACCTGAGGAAAGTACCATGGA
CTGCATTCAGAGCTTTCTTTTGTTTATCTCCTTAGCATAGCTACTCCTTA
ACCTGGGGTAGCCCAGTAAATACTCTAGGCCGTCCTAAAAACCTAGAGTT
AAACATTAGAGTGTGAAGGGGCCTCACATCGGTCCCAAGTCATCCCCTGC
TTGCAGCAGGGAAGGATGACATCCAGAGACAGATGGAGACCCACCTGTGG
TCTTCAAGTGAGGTTATGCACTGGCTTGAGGATCAGGTATACTGATGGCT
AATCCATGGTCCGTCATAGCCTACAGTGGGACAGCTTAGTTCCCCCCTAA
GCTGTGAAGCAGAACCAGTTCATCTTTTCTTTGAAAGTTTGTCACTTGTA
TATGCATTTAAGGGGAAAATGGTGTTCTGCCTAATTTGGCAAAGGAAAGC
TTGTGGTTTGCCGGCTTCAACGTGACGCTTGGTTTTTTCTCTCCCACAG

[0626] In some embodiments, the intronic domain that promotes trans-splicing primarily in the liver comprises or consists of sequences from the gene IL17RB. In some embodiments, the sequences from gene IL17RB comprise or consist of:

(SEQ ID NO: 570)
TAGGTGCATTAGAGAATGGGTATTTGGGGCTTTACATTGAAAGCACAGTT
GGACTTTTAGGAAGCCTAATATAGGCAATAGGTCATCGAAGACCAGACAC
AGGGTGACCCATTGCTTTATTGGCTGATGCAGATGAAGTCTCTGTCTGCT
CGAAGCAGAACTCTGGGGCTCTGTGGGAATGAGGCCGTGTTTCAGACAGG
CTAGCCTCTTGGCCAGTCAAGATGGGACTTGCCATACAAGGTGGAAAGTG
ATGCCTGCCACTCTGCAGAGGGAGATCAAGGCCGTGGAAGGAAGGTCACT
TAGAGTTGGGACCGAGAAGCAAATGTTTCATAGGAGAGCGGGTGTTTGAG
ATGGTGGCATTTGAAGAATGGGTAGGCTTCTGCCCAAAAAATGTGGGTAG
GAAGAGTGAGCTGGAGGAGAGATGGCACCAGCAAAGGTTAGGAGGTGGGA
AAGTGGGGGCTGTGTGGGCCAGCTGGCTGGAATCCAGGGCCAAAGCCTG

[0627] In some embodiments, the intronic domain that promotes trans-splicing primarily in the liver comprises or consists of sequences from the gene DNASE1L3. In some embodiments, the sequences from gene DNASE1L3 comprise or consist of:

(SEQ ID NO: 571)
GTGAGGACTGCTGTGTCAGACGAATTCCCATCTAGCAGGGGCAGGCTCTG
GTCCCTGAGTGGGATGAGTACCTCTCCAGGGAGGGGGAGGAGGAAGGGCA
TGTGCAGGCTACCACCACTTACAGCATTCTTTAAGGCCTTTCTTCAGCCC
TAAGTATCCCTTTTGCTAAATCTGCCTGGGTACCCTGCATGTGGGCCTTG
GGAATTGCCACACTTTCCCATTAATAACAGATGCCAACATTTACTGAGTG
AATAGCTAGTGCCAGGCACTGTGCTGAGACTTGACATGGACAAGTTTATT
TAATCCTCCCAATAATCCCTTGAGGTAGCTACAGTACCTTTCTCATTCCC
ACTTTGCAATTGAGAAGTGTAAGGCATAGAGCAGTCAGGATTGTTTCAGT
TGCAAGGGACAGAATCTTAACATGGCTCATGAAAAAAAGGAGCAATTGAT
TGGTTTGTGTAACTGAAATGTCCAGGAGTACTTCAGGCATAGCTGGATC

[0628] In some embodiments, the intronic domain that promotes trans-splicing primarily in the liver comprises or consists of sequences from the gene DNASE1L3. In some embodiments, the sequences from gene DNASE1L3 comprise or consist of:

(SEQ ID NO: 572)
CTGGAATGTGCCTGCGAGCTGGAATGTCCAGCACAAATATCTTGGTTAAG
GTACAAGGACATAGAATGTACTATGTGCCTGTGAGCATGTCTAACAGCTA
CATAGGATAGAGCTTAACAAAGAGTTATTAGCACAAAGCAAGGAGACTTG
AAGGAAGTTAGTCTTTAAAGGAAACTATTATTTCTAACACTTATGATTTA
TTCTTTAATAAGAAGGGAAACTTTGAAGAGGAAACTTTTTTACTTTCTAC
AACAGTCTACCAGCTTTCTCTTAGCCATGAAGGGCAACTGGGAGAAATGA
GTCTTTCGTGTACTAAAAATAGGCAGCCTAATGACCCCAAGATCATTAAA
ATCTCGGCCACTGGCTGGACCCTCTGGGAACTGGGGACCCAGATAATGCA
GCCTGTGCCTTCTGGAGGGGACAGCTGGTTTCCCTCCAGCAGTGTTTATG
AGACCTTGACAGGGGAAGTGTGTGACCCCCGCCTCTTTCCTGTTTCTCA

[0629] In some embodiments, the intronic domain that promotes trans-splicing primarily in the liver comprises or consists of sequences from the gene MYLK. In some embodiments, the sequences from gene MYLK comprise or consist of:

(SEQ ID NO: 573)
GTGAGTGCCCCCAGGAGCTGCCCCTCCAGGCCATGCCCCCATCCCCACCT
TCCTCCTGGCCCCGGCAGCTCCAGCCCAGCAGCCCTAGATTGTTTGTGTC
CTGCAGCTGAGGCTGCCAAAGCCAGAAGGGAGAGCCTGGAAGGGGAATGA
GGGAGGGAGAGCAGGGGAAGGAGGGGGTGATTTTTTTTTTTTTTTTTTTT
GCACACACCCTTATAAGGCTACTGAAGTCATTACCGATGTAATAAACCAA
CTAAGCAAGCGAGCGCCTCTCACCAATGTTCCCATCTATAAACACAGCCT
GGCCGGCCTCCCCCATCCCCTCCCGCTCCCCTCTACCCTCCCACCCTCAG
GGATTTGCTCTCCCCTGAAGTTTCTTTCTTACCCAGCCCCTTTTCCTCCT
GCTACTTTCCTTTTTCCCTACACTGGTTGCAGGGGGAGGGAGCCTGCCAG
CTGCGAGGACCTCTGTGGTGGAGGAGTTGGTGCTGATGGTGGTGGTAGT

[0630] In some embodiments, the intronic domain that promotes trans-splicing primarily in the liver comprises or consists of sequences from the gene MYLK. In some embodiments, the sequences from gene MYLK comprise or consist of:

(SEQ ID NO: 574)
TGAGTGGGGGTTAAGGGTGCTTCCATTCCCGAGCAAGAGAGGGAAAGGAA
CTACTTCTGTGTTAAGGGATCATGGAGTCAGAGTCAAGGTCACTGGGCAG
GCCCACCACCAGGGCCTATCTGTCTAGACCAACCTGCTACATCACAGTTC
CCAGCAGGGTTAGCCTTTCTCCTTCCCCTTTTATTGGTTGAGTGAGTGAG
TGATTGATTGAATGATTATATTATATACTTACAGAAAAGTGTTCCTATTT
CTGGATGCCTGCCTTAGCTGTTGTCCAGACATTCTTTTTTTCTTCTTCTT
TTTAAATAAGAGCTGAGAAAATAAAGGGTGACCACACAGTGAGAGGGTCC
TGCCCTAAATCTAAGGCTGGGGTGAATGTCTCAGTCAAGCCGGCGACTTC
CATCTTCCCCGCTGGCCAGCAGCCTGTGATCAAGTCCACACTGAACAGGC
CCTTTGCCCAGAGGGCCTCTTGATCTTTATTGATCTTTGGAATTCTTCA

[0631] In some embodiments, the intronic domain that promotes trans-splicing primarily in the liver comprises or consists of sequences from the gene CDV3. In some embodiments, the sequences from gene CDV3 comprise or consist of:

(SEQ ID NO: 575)
TCGCCGCGCCCGGCAGCGTGAGCGCAGAGCCGGCCTCGACCCCGAGCTC
GGAGCCCCGCGGGCCGCGCCCGCCGCCGGCCCCACCCATCCGGGTCGAG
GAGGCCGAGGCCATGGCTGAGACGGAGGAGCGGAGCCTGGACAACTTCT
TTGCCAAGAGGGACAAGAAGAAGAAGAAGGAGCGGAGCAACCGGGCGGC
GAGTGCCGCGGGCGCAGCGGGCAGCGCCGGCGGAAGCAGTGGAGCCGCG
GGTGCGGCGGGCGGCGGGGCGGGCGCGGGGACCCGGCCGGGTGACGGCG
GGACCGCCAGCGCGGGGGCTGCGGGCCCAGGGGCCGCCACCAAGGCTGT
GACGAAGGTGAGGGGCCGGGAGGCCGGCACTCGGGGCCCGGGCCGCGCG
CCGGCGCCCCATGTGCCCGCCCCCGCCTGCCGGGGAAGCGTCCGGGAGG
GGCCGCGGAGGCCGGGCGGACGGGCGCGGGCCGCCACGTGACGCAGGCT
CTCCACCTC

[0632] In some embodiments, the intronic domain that promotes trans-splicing primarily in the liver comprises or consists of sequences from the gene CDV3. In some embodiments, the sequences from gene CDV3 comprise or consist of:

(SEQ ID NO: 576)
TCTGGGGCCGCAGTGCCCAGCACAGAGCAGCGTTTATCGGGTGACGTCTA
GGCTGAGTAATTCCGTGTGCTGACCTCAGCCCAGTAGTTTGAGCTGAATT
TTCGCTTTCAGCAGCCGCATTTGTAGCAGCTCTTTTGTGATGACTTAGTC
TCTAAGCCCGTGAAAGAAAAAGAAAACTCTCGGTGGCAAGGTTGAAGTAG
AAATGTAGTTGTGAAATTCCTATTGACTTCTTCCTTCGGCTTTTCTTAGT
TGCTTAAAGTAACAGCTCCCATGCAGGAACCCAGCGGAAGTATAGTGTTA
GCCTACGAGCATGTTTGTCCTCCATTTAGCCTAGTTTGCCCCAGAACGAA
GCAAGGGCTTTGACCAGAAGACAAGTACATACTTAGTTTAGGTTCCAGCC
ACTTGATCCACTTTTCGTAGTGTGTTATTTGCTTAGTTATATGTCTACAA
ATAGCTTTAATTGATCAAATGGCGTTTGTTTTACAGGACGAAGATGAAT

[0633] In some embodiments, the intronic domain that promotes trans-splicing primarily in the liver comprises or consists of sequences from the gene PLSCR4. In some embodiments, the sequences from gene PLSCR4 comprise or consist of:

(SEQ ID NO: 577)
GTATGTATAATTTTTGTAGTGCTCAGCAGTATTTTAATCAGATGGAAATT
TGCATTATCCAATATCTAGTTCCTTCTTTATATTGATCATGTTTTAGTGG
CTCAAAGAAAAAAAAACTGCTCTATTACCCTATCTTCAAGAAAGTAATAA
AGTGAATTATTTTGTATAATTTTATCCTTCTATACATCATATAATCATAA
GCTCTTAGATTTGAAAAGGGCTTACATTTTATCTGGTCAATAGCCCTACA
CTTTACCCATTGTTCCTACTCCACATTTACCTTTCAAAGATGAGTAAAAA
AAGGAGCCAAGAGACTAAATGAGTTAGCCAGGGACACCACAGTCAGCTAA
TCACCTCCAGATCAGGAAATAGCATTTAAACCACAGTCAGCTAATCAGTG
GCAGAGCTGGAAATAGAATCCAAATCTGCCAAATCGTAGTGCAGTGCCCT
CGCTTTGGAAGTAAGAAGAAAAGATCTCAGTCAAAATGATGCCTGTTCT

[0634] In some embodiments, the intronic domain that promotes trans-splicing primarily in the liver comprises or consists of sequences from the gene PLSCR4. In some embodiments, the sequences from gene PLSCR4 comprise or consist of:

(SEQ ID NO: 578)
TAAAATAATATAAAATGGGGACACTCCATGTGAGGTTCACCCTGGCTTGT
TTGTTCTCCTTAAGCCACTGAGAGACTTCCCTTTTCTATGGCTGGTCCGT
GTTAATCGTTCTGAACTTAACTAAACAACTACAGGCTATGGATGACATGT
AGAGAGACCAGTGAGTAGGGACTTATCTAGGAACAATCTATAAGCACAGC
TTCTTCTGATGTGATTACTACAGCAAGTAGATGTTTTGTTTTTCTGATAT
AGCAGACAACTTTTTTAAAGTGGTACTGAAAGAAAGTGTTTTTCTAATAT
GGACAACTCTGCTAATATCCATCCGATCAGATGCAGATAAGCTAATTTCA
GTTGGTAAAATTTTTTTGATTCTATTGACTTTCAAAAATATATTTTGGTA
TCAATTGATGCATTTTAATATCTATTTCATCAGTTTATTTTACAGTGGTA
TTTTAGTTCTGTTATTTCTGTCTTCTGATTGCTTTGTTTTATCCCAACA

[0635] In some embodiments, the intronic domain that promotes trans-splicing primarily in the liver comprises or consists of sequences from the gene BCHE. In some embodiments, the sequences from gene BCHE comprise or consist of:

(SEQ ID NO: 579)
GTGTGTCTGTTTTTAGTGTTTGGTTATTTAATAGATGATGGGTTATGTAA
AAAAGGGATGAAGTATACTCTCCAAGGCACGGTGATGGAGTTACTATATG
TATCTCTGACTTTAAAATAACTTGGTTTAATGAACACATTATTTTTAAGA
CTTTCTTCTATCAAGTTTAGATATGTTTTGAACTCTTACTATATGACCAG
TACTTTAGTAGTTAAATAAAGAAAACTAAAATATAGATTTCACCCTGTGG
AAATATAAAATAGAAAAAGGAAACTAAAATAGAGCCCTACTTGTTATTCA
GATAATCTTTGTGGAATTAATTAATGGACAAAGAAATAAATATATCAAAT
AATCATAATGTATGGAACTAAAAAATAAGATGCATAAATTGGTAAAAACA
GATTTATTGATAAATAATAGAACCTTGATTTAAATGGAGAAAAAAACTCC
GAAGTTTACATATTTAAAAACACAATAAAAAATTTCTAAATATTCTGAA

[0636] In some embodiments, the intronic domain that promotes trans-splicing primarily in the liver comprises or consists of sequences from the gene BCHE. In some embodiments, the sequences from gene BCHE comprise or consist of:

(SEQ ID NO: 580)
TTTCCTGGAGTAATGAGATTATTACATAATAAGATTTGTAATTAAACTTG
GTCTTAAACTCAAGCAGTATTAATAAGAGTATATAGAATGAAATAGATGC
AAAAGATGAGTAAGTGATATGATTCCTTATTGTGAAATTTTTGGGCCTAG
GATAAGGGAAGATAATGAAACAAAAGTAACACCACCCTTTGAGCACGTTT
AAGTGTGAATGAAGATATATTTTATTGAAATAAAAAATTTCTTCTTCCAA
TATGTTAAGCAGAAATGCATATAAAAAATTCAACTTTAAATTTCAATTCT
TACAATTTTAAATAACATAGTGGTTCTCAGTGCTCAAACCACTAAGCCCA
GTTCACATACGTTTCATATCATCAATATATATCCACATTTTTTCTGTCTT
AAATTCTTTAAAGCTCTTGTGAACAGTGTTAGAAAACAATATTCTTTTTA
ATCTAACAATGATTTCAATTTTACTATAATGTCTCTATTTTATTATTTA

[0637] In some embodiments, the intronic domain that promotes trans-splicing primarily in the liver comprises or consists of sequences from the gene MASP1. In some embodiments, the sequences from gene MASP1 comprise or consist of:

(SEQ ID NO: 581)
GTGAAGTTCACTTTATAACCTACAGACAGTGACACCTCAGCTCTGCACTGG
GCCTTCCTGCTCCGTATTGTTCCCTTAGGGATTTTGAGGCTTGGGTGGGGG
TTGGTGAGTGGGAAACTAGGAGCCCAGACCCACCTCCAAAGTTCAATGGGA
CTTTGAACCCCAGAAAGCTTGATTTGTTTGTTCTACATGTCATGGACTCTA
GCCTCTAAACACGGTTAAGTTTTTCTGGTAGCTTATTAAAGGCTTAGCTTA
TGAAAATTCTCCCAGAAAACAGCAAGTTTAGACACCCCCATGGTGACAATC
CAGCTGTGCACCATGAGAACTGTACACCAAATTGGCCAGAATGAGCCAGGC
TCTTGAGAACCACAGTCCTTGCAGTAATGAACTTGGCAGTTACACTTAGAA
GTTCATATTCCTATCAGTTCAAGGAAAAAAAAAAAAAACACTTAACTAAAA
GTAAGGAGCCATAGTTTCAAGTCTTGGCTCCCACTAACTT

[0638] In some embodiments, the intronic domain that promotes trans-splicing primarily in the liver comprises or consists of sequences from the gene MASP1. In some embodiments, the sequences from gene MASP1 comprise or consist of:

(SEQ ID NO: 582)
AAGGGGTTTTAGAGAATACCAAGTCCAGCCTCCTCATTTTATGGATAGGAA
AACAGAGGCTTAGAAGGGGAGCAGAGAGGAGGGCTGGCTAAAGGCACCATA
GCACATAGTGGACTAGGCTGGGCTTTTTATTTATTCGCTGTTCTTGATTGA
GCACCTACTATGTGACAGCATTGCTATAGGCACTGTGATATAGCAGTGACC
AAGAATGAGATTCTGCTCTCATGGACCCTAGGTTTCAGACTAGTTGAGGGT
GGGACAGAATAGAAAACTAAACAAGTAAGCCAGTAACACATCATAGAAACC
AGTGCCCCTAGCTCTGCTGCAGGTAATCTGTAGCCCAGCTGCCTTTCACGT
CTTCCTCCCCACCACACCACCTTTCTCTGAGAAGAACAATCCAGTCTTTCC
TCCACAGAAGAGGATGATGGAGCTGCAAGCTGCACCCCTCCAAACACCCCA
CAGATAGCTTCTCTGTTCTCACAGTATCTTCTCTCCTCCA

[0639] In some embodiments, the intronic domain that promotes trans-splicing primarily in the liver comprises or consists of sequences from the gene IL1RAP. In some embodiments, the sequences from gene IL1RAP comprise or consist of:

(SEQ ID NO: 583)
AACCCAAAAGGACCTGGCCCCAGAAGCTTCTCTCTAAACTGATACAGCATC
CTGGCTCAGAAGTTTAAGCAAAAGAGACATTTTGTTTTGAAGAGAGATCTA
TAAAAAGAAGCCAGTATTGGGATTTGGTCTAGACAATGGGATAGTGTGTAG
CGTAGATGGTATAGTATAGTGTTAGAATCTTACCATTAATACTTTGTAATC
ACTGCATTATAGGTGGCTCAGCTTATCAACCTTCCTCGCCCTCACCTGTAG
TGGGGGTCTGTGGTTGCTTACTTGTCTGATTCCTACACAGTCCATAGCTCT
TGAGTCACTCTCAAATGCTTTGATTTTCTTCTCTCTATTTCTAGTATAAGT
CATAGTAGAACAGAAGATGAAACAAGAACTCAGATTTTGAGCATCAAGAAA
GTTACCTCTGAGGATCTCAAGCGCAGCTATGTCTGTCATGCTAGAAGTGCC
AAAGGCGAAGTTGCCAAAGCAGCCAAGGTGAAGCAGAAAG

[0640] In some embodiments, the intronic domain that promotes trans-splicing primarily in the liver comprises or consists of sequences from the gene IL1RAP. In some embodiments, the sequences from gene IL1RAP comprise or consist of:

(SEQ ID NO: 584)
TCAGACTGTGTCTAAAACTTTCTTTGTGTCTCTCACCTAACACAGAATCCC
AGAAAATCCCTTCAAGGATGTTTTCAATGGTCTTGAGAAAAGTAATGATGA
GTTATCACACATGAAATCATGAAATCAGGTCATTCAGAATCCTCCTGGCTC
CTAGTCTATAGAGTGTGTAATATTTCTTCAAAAGTGAATAACATAGCACAT
AATTGTTACATTTTACAGAGACTTAATGCTTTTTTAAAGCTGATGAAAAAC
AGGATTCACCTCAAACTTTCATTACAACTTTAAAACTAAATAGCAAAGGCC
TGAAATGTATATGCTGCGTATGAAGTACTAGTGAATCAGTTCAGGGTAATT
CATTGCTTCTGCTCCTCAGAAGCCAGTGTGAAAAGGAAAGACTGAAGTACA
TGATGTAAGGCAGTTTCCCAAATTGAGTTCTCGGGAACACTACTAAGAATC
AGTATTGTCCTGCAATGCATTATTGTACTCTAGAATCAGA

[0641] In some embodiments, the intronic domain that promotes trans-splicing primarily in the liver comprises or consists of sequences from the gene PI4K2B. In some embodiments, the sequences from gene PI4K2B comprise or consist of:

(SEQ ID NO: 585)
ATTTAGAATTCAAAGAAAGAGTCTTAACAACTAAAAAAAAAAAATGAAAAA
AAATTATTTATTGTATTTTATGTCATAAAAAGAATCTGGAAAAGTTCAGAT
AAAATTGCACTGTTACTGAATAAGCAGGATAGGTTTAAAATTTGGCCTCCA
TAATTAAATTCACCTTAATGAATATTTTTAGAAAAACGGCATTCTTTTTCA
GAGTGTCACCTTGAAGACATGTGTTTATTCTTTTTTTAAATTTTCCCAAAA
TAGCTGCTATGCTCCTTGAAAGTCTAGGGGTAAGCATTTTTTATTTGCTAT
GTATTCTTTATGTGATTATTTAAAATTAGTGTATAAAAATGGTTTTCTTGA
TAAATGTGGCTTATCTAAATTAGTGTTAAGTTTTCTTATTGTGTTTACATG
ACATATTTTTTGACAGTACTGCTGAGAAATATAAATATTAATCCCCTTGTT
CTTGTACTTTCTTTTCTAACTATAGTTCTTAAAATTATAG

[0642] In some embodiments, the intronic domain that promotes trans-splicing primarily in the liver comprises or consists of sequences from the gene PI4K2B. In some embodiments, the sequences from gene PI4K2B comprise or consist of:

(SEQ ID NO: 586)
TATTGAAGTTCTCTCATTTGTTCACGTAAATCTTGTTCATTTTCAAACTAT
ATTCTTGTTATCCAAATCAAAGCGGTAAACTTTTGTTGCAGAAGTCTTGAA
GCCACTTTCTCTGTCTGTCTTGGCAAACAGATGTAGTATTGACTCTCCTGG
GCAGAATTCATCCTGTGTGGGATAGATTCTGACTCATAGCAGGCTCCTAGA
TCAGTTCCTGTCCCCTAGGGAGGAATTTCCTAGGGGCAGGGCAAAGTCAGA
TATTGGAAATGTTATCTGCATAATGTGAGTAATTAAGGCTTCATTGTATAA
ATTATGTTAGGTGCTTATTTTGACATTATGTAACTCTTAGTGTAGTCTATA
AATACACTAAACTCTTAATTTTTCCTGTGCTATAAAGGAGCAATGACGTAG
ACCAGGGATGTCCAGTCTTTTGGCTTCCCTGGGCCACACTGGAAGAAGAAT
TGTCTTGGGCCACACATAAAAACAGTAACACTAATGACAG

[0643] In some embodiments, the intronic domain that promotes trans-splicing primarily in the liver comprises or consists of sequences from the gene SULT1B1. In some embodiments, the sequences from gene SULT1B1 comprise or consist of:

(SEQ ID NO: 587)
GTATACTCCAGACTCCATGTCAGTTTTTTAGTATGGCCCTATCCCTTTACC
CACTCACATAGTTTATTTTTTAAAATATTTTTTGTTTCTTTAACCATATAC
TTGCAACAATCTATACTATACCCACTCACGTTGTACGTAAATCTTCAAAAG
CCATTAAGTTTTAGTCTGAGTTTATATACTCAAGTTTTCCAAACTTGAGCA
GCAACAGAATCCAAACCTCAGCACAATATTACTACTTTTTTTTCCAACTCT
CCCTAGATCTTCAGGCCTTCTGTAAAAACTGAACTTAAGGACGTTAGTCCT
TATTTGAAGATTTGGTATAATTCTTTGTTGTAACATTTGTTCCTGCTTATC
TGCTTTTGGGGAAATTTTATACTTCAAATTCTATTTATTTAATAGCTACAG
TGCTATGTAGATTATGTGTTTTTTTCTTATCTGACTTTTGACAATTTGTGA
TGTGTGAGAAACTTTTCTAAGTTGTTGACTTTATGAATGA

[0644] In some embodiments, the intronic domain that promotes trans-splicing primarily in the liver comprises or consists of sequences from the gene SULT1B1. In some embodiments, the sequences from gene SULT1B1 comprise or consist of:

(SEQ ID NO: 588)
TAATGAAAATATAGATAAAACAGCTGATATTATATACAAAGTTAACATCAT
CTATGCTACAGTACCTAATACAACACGATAGCCAGTTTTAGACTTACTAGT
TATTGATACCTCTTTGGCATGAAGAAAACATTTAAATAGTCATTTATAGCA
ATGCACAGGTATAATAAAACTCCAAATTATTAAAGAGGGTATTATTATCTC
TCCTTTTGGAGATGGAGAAAGTGAAGTACAGAGATTCTGAGATACTTTCAA
AGTGTCTCACAATGCTTAAGTGATAGAGTTAGCATTTGAACTCAGGGTGGC
TAACCTCAGAATGTGTATCCTTGAATGTTACACAATACTGACTCTAGTAAT
GTGGTGAAATGCCTGTGATTGTTTCAGAATTTATCTGCATTACATAATGCT
CAAAAATGTCTTGAAAAACTGGTTGGCAAAATAAGGAAACGTAGCCTTTCT
GGAGACTCTAATATTTCCCTATACTTAACTAAATTTCTCA

[0645] In some embodiments, the intronic domain that promotes trans-splicing primarily in the liver comprises or consists of sequences from the gene CXCL2. In some embodiments, the sequences from gene CXCL2 comprise or consist of:

(SEQ ID NO: 589)
GTAAGTCTCGCCCATCGCTGCCGCTGCCACTGCTGGGGTCCCCGACTCTCC
CGCTGCCCCAAACCCTGTCCTCAGCCCGACCTCCTGTCTCACGAGATTCCC
TTCTCTCTGCAGAGCCACACTCAAGAATGGGCAGAAAGCTTGTCTCAACCC
CGCATCGCCCATGGTTAAGAAAATCATCGAAAAGATGCTGAAAAAGTAAGT
TATAATTTCCATGTACACAGGCGACTGGAGCTGTTGGTCAGAAATACTGGC
GTCTGCCCCCTAAAAAGTAAATCAGGAAAACCCAGGGTTAGCTGCAGGACT
GAAAAAATTATTATTTTCACAAAGTTGCCATTAAGGTTATTAATCTGTTCT
GGTGCCAGAGGATATTCCCAGTGCCCAGGGTCACCACCCAGGTTCTTCCCT
CCTGCCAGTGAATGTAGGTAAAACTGCTTTCATGTAAGGTCTCATTGGAGT
TTGCCAGTTGTGCTGAAGTGTTTTCCACCTGTTAAAAAAC

[0646] In some embodiments, the intronic domain that promotes trans-splicing primarily in the liver comprises or consists of sequences from the gene CXCL2. In some embodiments, the sequences from gene CXCL2 comprise or consist of:

(SEQ ID NO: 590)
ATTCGGGGCAGAAAGAGAACATCCCACAGTTGGCGGGAGTTACGCAAGACA
GTCAGACCCGGACGTCACTCGTGAGTGCCCCGACCCCCCTCCACCCCAGAG
GCGGGGCCATCGCCTTCCTTCCGAACTCGGGATCGATCTGGAGCTCCGGGA
ATTTCCCTGGCCCGGGACTCCGGGCTTTCCAGCCCCAACCATGCATAAAAG
GGGTTCGCCGTTCTCGGAGAGCCACAGAGCCCGGGCCACAGGCAGCTCCTT
GCCAGCTCTCCTCCTCGCACAGCCGCTCGAACCGCCTGCTGAGCCCCATGG
CCCGCGCCACGCTCTCCGCCGCCCCCAGCAATCCCCGGCTCCTGCGGGTGG
CGCTGCTGCTCCTGCTCCTGGTGGCCGCCAGCCGGCGCGCAGCAGGTGGGT
CCCGGCGCCCTGGGGTCCCCGGGCCGGACGCGGCTGGGGTGGGCGCCCCGC
GCCGACAGCCCCGCTCAATCAGCGAGTCTCTTCTTCCCTA

[0647] In some embodiments, the intronic domain that promotes trans-splicing primarily in the liver comprises or consists of sequences from the gene HSD17B13. In some embodiments, the sequences from gene HSD17B13 comprise or consist of:

(SEQ ID NO: 591)
GTAAGTACAGCACAGAACACCCAAATACTAAAACACCAATAGAGCTTTTTT
TTTTGCTTTTTTTTTTTTTAGACAGAGTCTCACTCTGTCACCCTGGCTGGA
TTGCGGTGGTTGCAGTGGCATGATCTTGGCTCACTGCAACCTCCGCCTCCT
GGGTTCAAGCAATTCTCATGCCTCAGACCCCCAAGTAACTGGGATTATAGG
TGTGTGCTGCCACACTACACCCAGCTAATTTTTGTATTTTTTGATAGAGAC
AGGTTTCCCCATGTTGGCCAGGCTGGACTCGAACTCCTGACCTCAAGTTAT
CCTCCTGTCTCGGCCTCCCAAAGTGCTGGGATTACAGTCATGAGCCACCAT
GCCTGGCCCAATAGAGCTATTATTATGGAGCATCTTTCAGTTGTGAAAATT
GGCATGGAAACTCTCCATCCCTGGGGAGAACAGTTATTTCCTCTGTTATTT
TCCTACCCAGTCTATAAAAAGAGAGTGATTCATTTTCTCT

[0648] In some embodiments, the intronic domain that promotes trans-splicing primarily in the liver comprises or consists of sequences from the gene HSD17B13. In some embodiments, the sequences from gene HSD17B13 comprise or consist of:

(SEQ ID NO: 592)
TTTACCCAGACCCTATTCAAGATGGAGTTGCTCTGATTTAAACGCCTCTGA
CAAAATGACGACCTCAAAACAATCCAGCTTTATGGAATACCTCCACAAGAA
AGAAAGTATACTTAGCTATAGAATTTTCTCCTTGCATCCAACAGGCTTTGA
GATGTCAGATGTTTCCTTCCTGTCCCATGATTAATCCTAGCCATTCCTCTT
TCTTGTCTGGCTCCACTACTCCTTACCATCTAATGCCTCGCCACCATTTTG
ATATTTTGACTAAGTGAGCTATGAAACACACCTACTGGATATGAAAGTATA
AGTTTCTGATAACAAAACATCAACATGGGATGTGGAGGAAGTGGGTAGGGT
GGCATTAATGCAGCAAATCCTGGAATATTTTAAATCTTCATTCTAAATTTA
GTAAAAATATAGGATAATTTTCCTGCCATCATTTACTTATAAAATTAAAAT
TTTAGAAAATAAAAATAATATTTTCCTCTTTTTAATCACA

[0649] In some embodiments, the intronic domain that promotes trans-splicing primarily in the liver comprises or consists of sequences from the gene ADH4. In some embodiments, the sequences from gene ADH4 comprise or consist of:

(SEQ ID NO: 593)
GTCAGTTTTTTTTTTCTTCATAGCTTTAAATTCTTTTCCTAGTAGTTCTGA
AATTCTTAGAGTGAAGGTTATTGAAAAGAAATAAAAATAATTTATTCAACC
ATTGAATCCCTAGAGCATATCCAAATACTACATAAAAACTATTAATGACTT
ATAAATAATTTATATAAAAAGGTAATTATAATTTGCAAATTGAAATTTAAT
TTGCATTTGAATGAACCAACATGGAGGAACAAAAAATAAACATTGACCTTA
TTGAGATAATTTCTTATATAGAGTGGAAAATAATCTTAAATTTTTCTTATA
AAGAAAAATTTTAAAATAGATATAAGTACAGAAAATTAAAGATGGAAGGAG
TTTAATCTATTTGAAGCAAACCAAATCTGACCTAATAATTTCATTCATTCA
GCAAATGCTGATTAAACTACTTCGTGTCAAGTGCCATGTCTTTATTTTGCA
TTTTGTCCACATTACAGGTTGGAAAAGTGTAGATTCTATC

[0650] In some embodiments, the intronic domain that promotes trans-splicing primarily in the liver comprises or consists of sequences from the gene ADH4. In some embodiments, the sequences from gene ADH4 comprise or consist of:

(SEQ ID NO: 594)
TTTTTTTTTTTTTGAGACAGAGTCTCACTCTGTGACCCAGGCTGCAGTGCA
GTGGTGTGGTCTCGGCTCACTGCAACCTCCTCCTCCTCCCGGGTTCAGGCA
GTTCTCCAGTCTCAGCTTCCCGAGTAGCTGGGACTACAGGCAGGCACAACC
ACACCCAGCTAATTTTTGTATTTTTAGTAGAGACGGGGTTTTGCCATGTTG
GCCAGGCTGGTCTCGAACTCCTGGCCTCAAGTGATCCACCCACCTTGGCCA
CCCAAAGTTCTAGGATTACAGGAATGAGTCACCTGCACCCGGACTGTGCTG
AACATTCTATTTGTAATGGAACACTGGGCCCTCAAGGCTCAATCTACAATG
ATACTATGATGTCATTAGCTTGAATCCCATTATCTTACATGCAGAGTTGGA
TTAATTTTTTTCTAAAGCATTGTACATTGCCACACTGGAGTTCATATTCTA
CTTTTCCACTGACTCAAGTATTCTTTTATGCTCCATCACA

[0651] In some embodiments, the intronic domain that promotes trans-splicing primarily in the liver comprises or consists of sequences from the gene ADH6. In some embodiments, the sequences from gene ADH6 comprise or consist of:

(SEQ ID NO: 595)
TTTGAATGTCTTGTTATGGTGTAGCTCGTTGCAAAATTCACCTAATTTTAT
CACAAATGCAGGAACTTTTTTTCCTTCCTGTTAATATACAGTCAAACATAT
TACCAAGTACTGGAGACTATCTATATCACTGTATAACCATTCACTGTTGTT
GCCAGCTTCAAGACCACATTTGAATCCTATCAGGCCCAGTAAACTCTGTGA
ATAGACTCTGTGAACTGTCTCTAAGTCTCACTGTTTTGTCCACATTAAGTG
TCTTGTTTGAAGCACAAAGTAAAATCTTTCTTTCCAATCCCTGTCACTGCA
CCTCCCTAGACAGTCACTACATGGGGCAGTTTATGGACTTCAGCAATGTTT
ACCTAACTCCAGATCCACACTATAGGAGTCCAGCCTTCAGGGAGAACTAGT
TTTTTACATTTTTTGCCTGCATAATGAGAAGCTTTAAGTTTTTCATATTTT
TACCTGAGAACAAGAATAATTACATTCTAGGCTATCACCC

[0652] In some embodiments, the intronic domain that promotes trans-splicing primarily in the liver comprises or consists of sequences from the gene ADH6. In some embodiments, the sequences from gene ADH6 comprise or consist of:

(SEQ ID NO: 596)
AAAATACATAATCCTGAAAGTATTTAAGTGTTCACCTACCGTTACTTTTGC
CATTAGCATTGTATTTCCAATATGGATTTTTTTTTTACATGACATATTAAT
GGAAGTCAGCTTATAAAATTGTAGCTCAAGTTTAAAAACATAAGAAGGTAG
TTCACAAATAGGCCATTGTTGTATTTGTTGTTCTACTTTGGGGGAGAAGAG
GAATTATTCATAGGATTCCTAATTCTGAATCCTATCTTTGACCCAAAAAAC
AGAAACCAGCCATAACCCAGAAACTGGCATTCCCCACACGAGTATAAGCTT
GCTTACCTACTTTTTACCCTTGGAGTTTCATGTCATTTTAAAAAATCTTCC
CATGGCTTATTTAATCTTCTCATTTTTCACCTAAAGAGAAAAAAAATCTAG
TTTACTGCTCTACAAAGTGAGAATTTGAAATCCAAAACACAAATGTTGCTC
TAAAAATGTTCCAACCTTTTTTCTCTTCTTCTTTTTTTCA

[0653] In some embodiments, the intronic domain that promotes trans-splicing primarily in the liver comprises or consists of sequences from the gene ADH1A. In some embodiments, the sequences from gene ADH1A comprise or consist of:

(SEQ ID NO: 597)
TACTTGTGTCATCTTTGCCATTGAGAAAAGCTATTTCCTATGACTTCCTGC
ATTTTTGGTATCTTCATAATCTTTAGTCATGGAATCCCAGTGGAGGGGACC
CTTCACTTGCCCTGAATATACACATGCTGGGCTATTGTGCTTGTAGTCTCC
TGCATCTATCTCAATTTTCACTGTCGGCATTTTCGCCTTTTTTTTTTTTTA
ATAAAATATACCGAATTCCTAGGGTAAAAGCTGTAGTAGGGTAAAGGATAT
ACTCATATTTACAAGTGGTGAAAGTCCAAGAGTTGTAAATCCAGGAAATTT
CTTAGGAACTCAAATAAAATGTCACATGTTTTCTTACAGTGAAGGAGAATG
TTTTTCTGACATTTATACTATGTCTTTATGGTCAATATACAATTGATTTTT
AAAAATAATAGCTGATTTCATGCTTCATATGACTAAGGTACAATTACTAAT
TGCAAAAACTGAACTATTCCTGGAATTATGTTCAAAAAAT

[0654] In some embodiments, the intronic domain that promotes trans-splicing primarily in the liver comprises or consists of sequences from the gene ADH1A. In some embodiments, the sequences from gene ADH1A comprise or consist of:

(SEQ ID NO: 598)
ACTCTATACTAGATATGCGACCAGACCAAGTTACAAATCTTTCTAAGTCTC
AGTGTTTATAATCTCTAAAATCAAAATAATATGAAAATCTACCTCCTAGTG
TTGATGTTTAGGTTGAAGTTTAAGACAGAAAATGCATGAAGAATGTGACAA
ATAGCAAAAACTTATCACAAGTTATTATCCATTGTTGTTTTATATTCCTTA
TTATAACAGGAACGTGGGCACACAACAATGATTTTTTGAAGATGCTAACGT
AGTATTGAAGTCTAAATGACAGGCATACTCAGAATGTTGTGAGTGAGCTTA
AAGTTGAAGAAAACACAAGAGAAAACCAAAAAAGATGAGCTTTCCTTTGAC
TTCACTTGACCCGAATGCATGGGGGTGGGATTAGAGTGGCTGAGAACAGAC
AGATTTTCACTAAGTCATTTCAAATGCTCCTTGGACTCTCACATGGAAGCA
TGTCTAAATGCTAATACAATGTCTCTTCTTTCCTATTGCA

[0655] In some embodiments, the intronic domain that promotes trans-splicing primarily in the liver comprises or consists of sequences from the gene NDUFC1. In some embodiments, the sequences from gene NDUFC1 comprise or consist of:

(SEQ ID NO: 599)
GTAAGTGTTAAGAGATCTTTTCAACTGTAAAATATAATATGTCACCTTGGA
TGAGTAGCTGTCTTCTTTAAGCTTCATCTGTAAATTGAGGCTTATAACCAC
GGCATGATATGTGCTCGTTTTGAAGATGAAATAAGACAATGAATGTAAACC
ATATGATACATTAATGCACCGTGCCTGGACCACAGAATTCAATCCAAATGC
TAGTTATTATTCAGCACGACACTTTTCTTTCTTCTGGCTCATGTAGGAAAA
TTTTAATAAACCTCTTGATGAATAGCCGTAGAGATGGGGTGAAAAACCCCC
AGAGGACAGAGAATAGGTAAACTCTTTTTTCTTTTAATTATTTTCTTCCTA
ATTCCACTGTATAGACAGAAGGCTGAGGCCGGGGTGCTAGAGAACCTTGCC
GTGCTGGAATTCACGTTGACGCCCCCACGGAGCTCTGCTGCAGAGCCCTCG
AGTCCCGCACTTCCGGCCGCCAGGTGGCGCTGGTTCTGTT

[0656] In some embodiments, the intronic domain that promotes trans-splicing primarily in the liver comprises or consists of sequences from the gene NDUFC1. In some embodiments, the sequences from gene NDUFC1 comprise or consist of:

(SEQ ID NO: 600)
TTTTGGTTTTAAAATTAATGACATAAAGTTTAAAGGATTAGTTTTAAAGGG
TCAAAATGTATTGTCTGTTACCTATAAATATTTTTACTGGTCTTTAGACAT
CAGATTGAACTGAATTGAATGTACAAAGATCTGGCTCAACTGTGCAAGATA
AAACCTATTCCTCAGAACGATGTCTTTAATAGGCAAAACCAAATAAATTGT
TTACTACTACCAGACACTTGTTTAAGCTTCTCAGCAACCCTATAGGTTTTA
TGTTACAGATGTAAAACTTAGGTATAGAGAGGTTAAGTAATTTGCCTAGAA
ATCATAGAGCTAAAAAGTGGTGAGCAGAATGGCTTTGAACGCTGATTCTAC
AGCTTATGGTCTAGGGTGGTCCAAGTCTGTTAGGTGGGCTAATGAGGATCA
CTAGATCTGGAGTCAGAAGACCTCAAACTGTATCCCACCTCTGCCATCTGT
GTGATCTTAAGCCTACCTAAGGCACTAATTCTACTTCACA

[0657] In some embodiments, the intronic domain that promotes trans-splicing primarily in the liver comprises or consists of sequences from the gene SORBS2. In some embodiments, the sequences from gene SORBS2 comprise or consist of:

(SEQ ID NO: 601)
GTATAATATCACTAACTCACACAATGTCGCACTTGAATGGCTTCTAGCTCT
TCTGACTGTTTTTGTTCTAAACGTAAAAAGCAAAGGAAAATGAGATCTTGT
AGGAAACATTTTAAATGTGTAATTAAAAACAGCAGTCACTTGCCAAAAATA
GGTTGAGTAACTGCGAGTGTTAATAACTATTCACGTTTTTGTTATCTCATG
AACTTAAGTAGCATAATATTTCATTAAGATAACTCAGAGGTTTTGGGGTTT
TTTTTTTTAACCTAAAAACTTTTGGGGTAGGGGTACAGGGGTACAGGATGA
AAAAAGGGATTTGTAGGAAACTGAATCTTCATTAACTGGATTCTTTGTCAA
AGGTTGTGAACAGAATGATAGAACATTAGTTTTGAAAGAGACCTTTGCTTT
CCTTTAATCCAATCAGCAAATACCCTTCTACTATATATATTTAAACATACC
AAAATCTTGACCAATTAAGATTCACATGTACCCACAGATA

[0658] In some embodiments, the intronic domain that promotes trans-splicing primarily in the liver comprises or consists of sequences from the gene SORBS2. In some embodiments, the sequences from gene SORBS2 comprise or consist of:

(SEQ ID NO: 602)
TTTACTGCAAGAATTATTCAAGCTCTCTTTGGGAATTATAACAGCTAGAAG
ATGGTAAAACTTAAATGATATTAACTTAAAAGTATGTTGTACCATAGCCTT
TAATCCTGACATGGAGCTAATCCTTGACTCTAAAAGCCAGATCCAGTGCTT
ATAGATTTAGTATAAATTGAATTTAAATGGTATAAACAAAGTTGAGTTCTG
TGCCTGAGTTTTCACAAAGAAAACCATAAAATGTTAAGTATTAAGTCTTCC
ATGCTTTCACTAAAACAGTGATACCTATTTCTAAGACAGATCCCTGGTCTT
CTTTTGTTTTGTTTCGTTTTGTTTGTTTTAGTTTGAGGGTGGTGTGAAATT
GGCAGGTGCATTCCATGATTACTAATTCTAACTGTTCATCTTTCTCATGGA
TGTCTGGCACATTTCTCTTAAAACGCATGATATTGCACGTGCTTTTCCCGT
TGCCTTGGCCTCTGCTATATCATTTTTTTGCTTCCAGATA

[0659] In some embodiments, the intronic domain that promotes trans-splicing primarily in the liver comprises or consists of sequences from the gene KLKB1. In some embodiments, the sequences from gene KLKB1 comprise or consist of:

(SEQ ID NO: 603)
GATATGTACACAACTAAAACAAAACTAAGATATAAGATCATATTAATGTAA
TGATAATAAAAGTGGATTGTCTCCTGTTCTAATTTTAATAGGCACAAGGCA
TTTTTGTTAATCACTTCTTATTAAAGAATTTTTTATAATATTCAGGAAAAT
ACAACAAAAAAACCCTTACATTCCTAAGGCCTCAGAGTCAGAGTAATATAA
AGGAAATGTAAACACATGCTGAGTAATGCAAGCATTTGGCAATGGTGGTGA
CTGGAGCTGGGAGCACAGCTTTTATTTCTCTGAAATAGGAATTTGCCCCTT
AGAGTTAGACCAATTTTGCCTTCCTCTAAATGGCAAACAGTTTGGAGATAC
TTTAAAGGACATTTTTTCACTTAGGATGTTTAGTACTATGAATAATAAATA
GTCACAATTTCCTTAACTATGGTGACAAAATACAAGCAAATTTAGCCTCAT
GTCATTTCCTAAGGAACATCTTCTCTCTGTGAGTTCACAG

[0660] In some embodiments, the intronic domain that promotes trans-splicing primarily in the liver comprises or consists of sequences from the gene KLKB1. In some embodiments, the sequences from gene KLKB1 comprise or consist of:

(SEQ ID NO: 604)
CGAGTATGCATGGAAAATCGCATCACAAAGGCGAGTATGCATGGGGAGCAC
TTGCTGCTGTACTTTCATCACTTTTATAGTCTGAGTTCTTAAAAGTTTCGT
TCATTTCCCTCAAAACACTTGAACCTGCAGTTTCAGTAGGTACTGTTCTGC
CAGGTGCAGATTAGTTAAGAGATTAGCAGACTTCTCTGCCTATCTTCTCTT
ACTTTAAAACAAATGTTACCATTGAATCAAGGAAGCAATAGCCATGAGAAA
AAAGAAGGATCTGACGCCTTTGAATGAAGATTCAAAACATGATCTTCATGT
TTTGTATTAGCTTGGAGTAAAATCCACTTGCTGGCAATATAGCCCTTAAGC
TTGTTGCCTCTTCTCTTTGTTTCAGAAACTAGAGCCCTGTTTATTCTGATC
AAGGCTCTGGCCCACTGTCTTTATCTCAGATAACCCACCCTCTTCTGCACA
CAGCATGGAGCTAAGAGAAGGGTGTCTAGTTATGTAATAT

[0661] In some embodiments, the intronic domain that promotes trans-splicing primarily in the liver comprises or consists of sequences from the gene C6. In some embodiments, the sequences from gene C6 comprise or consist of:

(SEQ ID NO: 605)
GTAAGAGATACCCTACAGACTGTGTCTGGAAATTGGGAAAACCAGTCTAGT
GTAACCAATTTGATGGAAGAGCTGAGCTTTTTGAAGCACAGACATGAAATA
AATGAATTTTCCACATAACTGATATTCCTGTGCTCTGCTGAATTCCTCCTT
CCCCATTGGGTAGCAAGTTTCTTAATTATCTCTCAGCCCAGTTCCCTGTTT
AAAATGAGATTGTTCATTATAACAGTCTCATTTTGGTTTTAAAGACTTAAC
TTCTGCACATGTAAAAACTTTAAACTCAGTTATATCAACACTTTCCTGTTC
CTCTCACTCAAGCCCAGGGCTTGGAGTGGGGTGGGGAAAACAGGCAAAAGA
AAACTGGTTGGTGAGTGAACACACTACATTGGCTACGTGCCCCCTGTTTTT
TTCTGATCTTCATATAGAAATGCTTGCTTTCCTCTCTTGGGCAGCCATCAT
TCAGAAGATCTCTGTGTGTTTGACACAGACTCCAACGATT

[0662] In some embodiments, the intronic domain that promotes trans-splicing primarily in the liver comprises or consists of sequences from the gene C6. In some embodiments, the sequences from gene C6 comprise or consist of:

(SEQ ID NO: 606)
AATCTTTCTAGCTACATCAATTTTTTATTATATGCTTCTCTTTGATAGCCC
TAAGAAAGGCAACAATTCTATATTTATATTAGTGTGCTCATTTGATTAATG
TCTGTCTGCACCCACAAGACTATAAGCTTGGTGAGCACAGGATCTGGGTCA
GTTTATGCTCAATCTACTCTCTCCAGAACCTTACAGAGTGATGAGAATATC
ATGTATACTCAATAAATATTTGAAAAACAAATGAACAAAAATTTCAACAGT
TCCATTTTCTTTAGTTATCTGAACATAATCGCAATTTTAGGTTGGAAAATG
ACACCTCATGTGCACTGGAAAGGACCTTTCAGGTGGAATATTTAATGACAA
TGTATTTAGAGAAGCCAAAATGAATGATCTAACTCCAAGAGATAAATATGA
ATCCTTTACCACTGCCTCTTCTCTGAATTCAAGCTTATCACTTAGAATCCA
TGCTGTGCACTGTTCTTTTCTCCTTTTTTCTTTTGTTTCA

[0663] In some embodiments, the intronic domain that promotes trans-splicing primarily in the liver comprises or consists of sequences from the gene MRPS27. In some embodiments, the sequences from gene MRPS27 comprise or consist of:

(SEQ ID NO: 607)
GCAAGTGCCCATTCCAGAGACTCACTCACCTGACATATTACTACTGGAAGT
TGAAAAGTCCCCACATTTATTTGTCTGAACTGCTTAAAAAGTCACCAACAG
GAATTCTTCTCAAACTTGCCATCCAAAATTGAACCCCGCTGGCCCAGTGTT
TTGACTTGTTTATATTCCAGATAGCCACTCACGTAAGTTTATCTTTTTAAT
GCTGATGGGGGCCAAGAAAGGAGTTCATTTGCTTCCTGGCTGGGAAATTCA
GGAATTGCATTTTGGGCAGCATATTTTATAGTATGTGTGTAAGTATTTCAC
TGCTTTTCCTCAGTTTATTTTTTGTGAGAGTTCATTGAAAATGTCCAAGGC
TGGGCACAGTGGCTCATGCCTATAATCCCAGCTCTTTAGGAAGCCGAGGTG
GGAGGATCACTTGAGGCCAGGAGTTTGAGACCAGCCTGAACAACATAGCAA
GACCCTGTCTCTACAGAAATAAAGAAGGAGGCAAAGGCAG

[0664] In some embodiments, the intronic domain that promotes trans-splicing primarily in the liver comprises or consists of sequences from the gene MRPS27. In some embodiments, the sequences from gene MRPS27 comprise or consist of:

(SEQ ID NO: 608)
CTAGGCAAGCTCTGTCTTCACCTGAAAATCCTACTCAACACTGGGGACAGA
GATCTCTTTAGCCATGGGATACCAACTTTTAGAACTAGAGCTAGAACTTGA
GAGTACACTTTGTCACTCTTTCTTATGCTCCTCCAAGAAATACACATTTCC
TCAGAATTGTAAGTGTAATCACATTTTATAAGCTGAAATCTCAGAGTACCT
TTAGCCTTCATGAGCACAACCTTGTTGGGGATATTTGGGTTGTATTTGTTT
CTCTTTTCTACACTCACATGTTTGCCTATCTTGACAGCCTGTTGGCCTAGG
CAATAATAAAGCTTCTGTCGAGGTGAGCAAACAGCTGATGGCATAGGCGCA
CAGAGGGGACTCCTACAGTGGCTGGCTGTAATCTGCCAGGCTGGTGGTCAG
AGCAGGCGAGAACAAAAGCCAGTCTGTTTGCAGGCAAATTGGAAAATCAAT
GTGTTAGTTGTATTCTTTTCTCTTTGCCTTTCTTCTGACA

[0665] In some embodiments, the intronic domain that promotes trans-splicing primarily in the liver comprises or consists of sequences from the gene DMGDH. In some embodiments, the sequences from gene DMGDH comprise or consist of:

(SEQ ID NO: 609)
GTAAGCATATCATTTTTTTGAAATTAGTGTTTTTTAAGTGCCAAAGAAAGA
AGATATTTAGCCGTAATGTTTCGTACGATGGACATTGTCATGAAGCACTGT
GATGCTCCCAAGTTAAACATTTTGTCTGTTTCTAAGTGACAAAGCCCTCCC
TCTATCACTTTGCTCTTGGTGGATGCGCTATCACTCTGTCCTTGGTTATCC
AAAAAAAGTTGCTTATTTTCTCCATTCTGCATTTTATTTTGCTCCAGATTG
TGTTTTTCCAAATTATGTTTATTTTTCCTTCCTGTATTCACTGTTTCTCTA
TATGAATAACCAGATTCTAGTGTTGAAGTTCATAAGCATCCTCTTTGTGTC
CAATTTGCTTTTTAGGGCAGATTTGATCATTTGGGTTCTCTCTCATCCATT
TCTGATGACTTTTGACTCTAGTTGAAAAAGTTTTTAAATGCTTTTCCTTCT
AGAACATTATTAAACATATTTCATAATCTTCTCTTTTTGT

[0666] In some embodiments, the intronic domain that promotes trans-splicing primarily in the liver comprises or consists of sequences from the gene DMGDH. In some embodiments, the sequences from gene DMGDH comprise or consist of:

(SEQ ID NO: 610)
AATAGATGAGACCCATATATAATATTTCACTGATCATTCTATCAACGTATC
CCATCTGAGTTTCATTCTTCTTTGTTTTCCCCACAGTACCTTGCCTGAAGG
CCTAAAACAAAGTAGATATGCAAGAATTAATTGTTGAATGATTGAATCAAA
CATAAATTTCCTGACACCAGATATATTATTTAATGTGAATTTATTAACAGT
ATTAAAAATTAAATATAAATTATAATTGATATATCAGTTGGAATTAGATTT
GTCTTCAAATGTCAGAAACCAAAATAAGAAGGTGTAAACAAGATAGAGGTT
TATTTCTCTTTCTTTTCAGCAGTCCAGGACTTGAATGGTGGCTTTTTCATG
AAGTCTTCAGGGACCCAGTCACTTTCCAGATCAAGAAACACTTTTGAAGTC
CAGTTTTACTAAACGTTTACTAGCAGGATATATTTTTACTGAGTAATAAGT
ATATATATATTTGAGTATTGACTCTGGTATGATTGATTTA

[0667] In some embodiments, the intronic domain that promotes trans-splicing primarily in the liver comprises or consists of sequences from the gene ZCCHC9. In some embodiments, the sequences from gene ZCCHC9 comprise or consist of:

(SEQ ID NO: 611)
GAATGCTCAACGAGCACTGAAGGGGGGACATGAGGCACTGCCTCTCACCCA
AGAGAGCCCCCAAATGTCCTTTTCAGACTTTTATCACAGTGACCCACTCCC
ACCGCGCCTTTACCTTGCCTCTGCCTGGAATGTCCTTAACTCCCTCTTGCC
GGCAATTTCACCAGATTTTTGATTTCTTATCCAGTCTCACGGGAAGCCTTT
CCGGCATCTCCCACCCTACCGATCTTCCCGTCTATCTCGCCTGCTACACTG
TGAGTTCAGACAGCACGGATTGAACTCTTCATCTTTTCGTGTCGGCGTCCT
GCACAGGGCCATCCCATCACTAAGCGCGCCACAAACTCAGCCCAGTATTGA
CGCCCACGAGTCGCTTGTAAAGACCGTCTGTGACGCCGGAAGTGACGCGCT
CTCGGGCACTATGTGCTTCCGGTCTCCAATACCGCAGGAGGGCGGTCTTCC
CCGGCTCGCCAACTCGGCTGCTCTGGGGGATTCGTGCGCG

[0668] In some embodiments, the intronic domain that promotes trans-splicing primarily in the liver comprises or consists of sequences from the gene ZCCHC9. In some embodiments, the sequences from gene ZCCHC9 comprise or consist of:

(SEQ ID NO: 612)
TGAGGTTCTCAGCCACCAAAGCTGCAGGGTCTCGTCGTTCGTTCCCTCTGG
CCTGGCGGAACTTGCGTGGGAAGCTGGGAGGACAGAAGGCTTAGCCGCTGG
GTCCCTGAGCTGGCTGGAGCGCGGGCTGTCTAGGGGCGGCGACCTCAGCTG
TTGGGCTCCGGCTGCTGGGGGCTGTGCGTCCAGCCGCCCTGGAATCCGCCT
GTGGGTGGGCCGCTTGGCTCTCCCACTTCACCCTCTTGATAACCCAGAGCC
TCCCCCTTCCCACGTACGTAGGGGAAGGATAATCTACTTCCTTTTGAACAG
CTTCGGTCCCCACTATGACAGTCGCATAAACTTCAGCGAAGAGTGCGCTGG
TAAAGTGGCATGGAGTTTCTCACACCAATTCATTGGGTCCACCCTTCAGCT
TCTGTGGAAGGGGTCTTTCTGTTACTAGGAGCTGAGACTTGGGGGGTTGCC
AGGGATGCTGGTCTTAAAAGGTGATAATTTAGGCCGGGCG

[0669] In some embodiments, the intronic domain that promotes trans-splicing primarily in the liver comprises or consists of sequences from the gene LEAP2. In some embodiments, the sequences from gene LEAP2 comprise or consist of:

(SEQ ID NO: 613)
GACGATCTGGGGAACTGTAGGCCTTGCTGAAGCATCCTCCCACAGAAAGGA
GATAAGGGCCTTATCCAATTGGCTGTACACAATAGATCAGTGCTTCTTTCC
TAGACAAGGCTGAAAGGGGCCAACATTATTTCTGAAGACTTCATTATTGGA
ATTCTATGGGAGTGATCTCACTGAGCTATTTTGGAATAGAAATGTGGCTAG
TTGCCTGACCTCCCTCAATGGTTTCACGTGGCTTTCAAAGGGAAGGAAGGG
CAGTGCTGACTTTTGGTAAAATGGGCGAAAGGGTCCATGCCAGCAACACAA
TCACTCAAAGTCCAGATGAGGGATCAGTAAATACAACGTGCCTGAAAGGTG
GCCCTTGAGCACATTCCTCCGGTAGACATTAACTTATTAAATTGATTCTGA
TTACAAATATAAACTTTGCCCCCATCTCACCCAGTAACAATGCAAGAGTTG
ATGTCAGTCTATAAAAGGAAGTAGGAACTGTCCCTGGCTT

[0670] In some embodiments, the intronic domain that promotes trans-splicing primarily in the liver comprises or consists of sequences from the gene LEAP2. In some embodiments, the sequences from gene LEAP2 comprise or consist of:

(SEQ ID NO: 614)
TAAGGAGGGAAGGATACTTATGTGTGTGTGTGGAGTGTGGAGATGATAGTG
GTGGTGGAACTTGAAAGCTAGATTCAGTCCTGAGGAATGGTTCCTCTGTTC
TGAGTCTACAGCATCTGCGGAATGGAATGATCACTCTTCCAAGGTGTGCAG
CAGGGTGTCAACACTTTCATATCTGAATGTCTTTGCCCTTACAGATAGATG
GCTCCCCAATACCAGAAGTGAGTTCGGCAAAGAGAAGGCCACGGAGAATGA
CCCCATTTTGGAGAGGGGTTTCCCTCAGGCCTATTGGAGCCTCCTGCCGGG
ATGATTCTGAGTGTATCACAAGGCTATGCAGGTACTCCCTGAACCTGGGAG
CAGGGTTGGGCCAGAGAGCCCTGGGAAGCTGGGCAGAGGAGTGACAAGGGG
ACACATGAACCTAAGAATAAAGCTGGGATGGAGGAGTTCTAGACTGAGACT
GGGAGCTCCATGGAAAATCCCTTAGGAGTTAGGAGCCAAG

[0671] In some embodiments, the intronic domain that promotes trans-splicing primarily in the liver comprises or consists of sequences from the gene ETF1. In some embodiments, the sequences from gene ETF1 comprise or consist of:

(SEQ ID NO: 615)
GTAAGGGGCCCGCGCTCCCCGGTTTAGATCACTCGGCCCCCCTCGTGGTAG
GCCACCGCTACTTTTGCACCTCTCCCGGGCCCTTAAGTCCAGGTCCTCCCT
CTTCGGGCTCCAGGTGCTGCCACCCGACTCGGGTGCTATTGTGGCAAAGTG
TTCGGCCTTCCTTTCCCAGGGCCCTTCCCTGATTTCCTCTTCTCCCTTCAT
TTCTCAGCCAGGCCTCATTAAAATGGCCTCTCCCTTCTGGGCTTCTGAGAC
CCGGGTGGGTGAAGTTTGGATGGGACGGGAAGCAGAGGTGGCCAGGGACAG
CTTCTTTCTGATTCCTGATTTCTCTGGGTCTTCCACCTGTCCCAAGATGAC
TTCTCCCAAGTCCTCTAATTACCCCGGAGCTTCCTGGTTTTAGCTGTTCCA
GGACCCACCTATAAACTGAAAATGCCAACGTACGCGCGATGTGAGGGGTGC
TGGGTAGGTTTTGGTTAATGAATCTGCATGTGTATGTCCA

[0672] In some embodiments, the intronic domain that promotes trans-splicing primarily in the liver comprises or consists of sequences from the gene ETF1. In some embodiments, the sequences from gene ETF1 comprise or consist of:

(SEQ ID NO: 616)
GAGAAGTCGCGGCGGACGCCCAGCTTCTCCTCACTCGCACCGGCCCCCTCC
CTTCCGCCTGCCGCCTTCCACTCCGCCCCTGGCGGAGGAAGTGATGTCACA
GGCCCCATGTGAGCGGATTGCAACACATGCAGCTGCCTGGAGAGAGGGAGC
CGGTGTCCTACGTCAGAGCCGCCGCCGCCGCGGAGCCGCCGCCGGGGAGGA
GCAGCCGCTGCCGCCCAGGACTGGGCCCTTAGGTAAGGCACAGGGAGGGAA
AGGCCGGTGACCTTTGTGGCGAGCTGCACCGGACGGGAGGAGAGGGCCTCT
GGGGGATGGCGAGGAAGGGGGCCGCTCTGCCCCAGCGGCGGCGCTAACTCT
GTGGTCTTGGTGTCTCCGGGCCCCGCCGGGCCGCTCTAGGGAGGAGGAGGC
GAGAAGATGGCGGACGACCCCAGTGCTGCCGACAGGAACGTGGAGATCTGG
AAGATCAAGAAGCTCATTAAGAGCTTGGAGGCGGCCCGCG

[0673] In some embodiments, the intronic domain that promotes trans-splicing primarily in the liver comprises or consists of sequences from the gene RNF14. In some embodiments, the sequences from gene RNF14 comprise or consist of:

(SEQ ID NO: 617)
CATTGCTGTCTTTTATTACATCTTTTTATATTAAAAATAAATAAAAATGTC
ATAAATAGTAATTGTGTAAATATAAAAGGCCTTATTAAAAAAACAAATCTT
AGTGCCTCAGTTTTCTCTTCTGTCAAGTGGGCACATAAAATTACCTAAGTC
ATAGGGTCCTGGGCATTTAAATGAGAGAATGTACGTGAAATATTTAGCACA
GTGGAGGGCTAGGCACACGGGGAGACTGCAGTTTAAAAGACTAACCAGGCA
CATGAGACCAAAGACACAAAAGTCTGTTATTTTCCTAGAGTCAAAAACAAA
ACTTATTAGAAGGCTGTCTTTACCCAATCTTGTCCTCAAAATTGACTCTAA
ATCTTTAGTTCACTTTAAACATTCAGTAAATTATTAACACTGCTTTGAAAT
TCTCTTTCTATTCTCTCTATCCTGTGACCTCTGACATGATGTCACAATTCA
CCTTCTGCTCTGACTTTGTGAGGATTTCCCAAGCTGGTTG

[0674] In some embodiments, the intronic domain that promotes trans-splicing primarily in the liver comprises or consists of sequences from the gene RNF14. In some embodiments, the sequences from gene RNF14 comprise or consist of:

(SEQ ID NO: 618)
TAGGGTTGCTGTGTGTTTTGCTCTTGGTCTAATTCCTTTGGCTAAACATGA
ATAATTATATTAATGAATGGCTTTGGAGATTCTTCTTCCGTCCTTTGCATT
TTTCCGAGATATGTTTCTGGTTTTGGTATCTATTAGAAGGGTATTTTGGTT
TCTGTTTTGTGACAATCAAGATTTATAGTACAGAAAATTAGAAGTGATTAT
TTCTATTTCAAGGTTCTTTCTGTGGCAGCCAGGTAATCCCTTGGGTGCCCT
GATTTACTCACTTGGTTTTTTTCTCTCTCCTGGGTATAAGACCAACTACAT
AATTTACAAAGCCCAGGGCAAAATAAAAATGCAGCCTCTCATTCAGAAATT
ATTAAGAACTTCAAGAGGGTGAGAGCACAGCATCAAATCAAGAGCAGGGCA
CTTCTTTTTTATTTTAATTTTTCCATAAGTTATTGGGGTACAGGTGGTATT
TGATTACATGAGTAAGTTCTTTAATGGTGATTTGTGAGAT

[0675] In some embodiments, the intronic domain that promotes trans-splicing primarily in the liver comprises or consists of sequences from the gene NR3C1. In some embodiments, the sequences from gene NR3C1 comprise or consist of:

(SEQ ID NO: 619)
GTAGGTTATATTTTTATTCCCATTCTATAGCTGGGTAAAGTGAGTTCTAAC
AAAGTTACTTGTTAAAGGTCACTCAGAGGTCAGAGCATCAGAAAAAAAGAC
AATCACAAGGCTGATGTTGTGTGCTGGATAGTTTAAACTGAACAGGAAGAA
AACATTTTTGTGGGCTTTATCTAAAAAGAAATAGTTTGCTCTGAGTTTCTC
AGTTTCATTTATTCAGCAAGTATGTGCCAAGTGCTATTGTAGGCAATGAAG
ATACAGCAGGGAACAAAACAAAACTGACATGGAGCTTCCAACTAGAAAGGA
GAACGAGACAACGCGTTTTAAAATATATATAATGTGTTAGGTAAAAAGTGC
TATAAGGAGAGCTAAAACACAATGAGAGGCTAGAAGAGTGATAGTGGCGGA
GGGGCTTCTCTGAGGAGATGACATTTGATCAGGGGTCTGAATAAAGTAAAG
AGGCCAGTTATGTGAATATCTGGAAGACTCAAGGGGCAGG

[0676] In some embodiments, the intronic domain that promotes trans-splicing primarily in the liver comprises or consists of sequences from the gene NR3C1. In some embodiments, the sequences from gene NR3C1 comprise or consist of:

(SEQ ID NO: 620)
TAACTATAAATTGTGCATTCTTGCATAGATCCTCCTTGGGAATGAGAAATT
AGGAAAATCCAGTTGTTAAAATGAATGCCTAAAATCAAAATAAAATTTGTT
TTTCTGGCACCTGCTTGATGACACAGACTAATAACCAATGACAAAATTGCC
CTTGAACCCAAGTTTTCATTTCCTCCTATTGTGTGGTCAGGTTATGTAAGG
GTTTGCTTTCACCCCATTCAAAAGGTACCTCTTCCTCTTCTCTTGCTCCCT
CTCGCCCTCATTCTTGTGCCTATGCAGACATTTGAGTAGAGGCGAATCACT
TTCACTTCTGCTGGGGAAATTGCAACACGCTTCTTTAAATGGCAGAGAGAA
GGAGAAAACTTAGATCTTCTGATACCAAATCACTGGACCTTAGAAGGTCAG
AAATCTTTCAAGCCCTGCAGGACCGTAAAATGCGCATGTGTCCAACGGAAG
CACTGGGGCATGAGTGGGGAAGGAATAGAAACAGAAAGAG

[0677] In some embodiments, the intronic domain that promotes trans-splicing primarily in the liver comprises or consists of sequences from the gene ECI2. In some embodiments, the sequences from gene ECI2 comprise or consist of:

(SEQ ID NO: 621)
GTAGTGCTAAAAAGTGACGACCTCACGCGCGCCCTCCTGCACCGCTGGGCC
CGGAGTGGTCAGGATGGGCGCGTCGGGAGGTCAGGGCTATGGTTCCCTGTC
AGCAGTCCCCAAGGTCTCCGCCTGCCTCCGCGCACGCTCCCATCCTCCTGG
GGCCGGACTCCGGGCGGGTGAGCCGCCCCAGCTGAGCACCCGGGCCTGCAC
TTCCCAGCCGGGCTGCTTCTGGGGTGCAAAGCGTCGCTTGCTAAAAGCGAG
GTAAACGCAAGCCGTTATCACTCGTGTGGACTTAACACTCTGCTTCTTGGA
GAACACGTATGCTATAAAGTGAAATGGCCGGGTACAGAGTAACGGCTAAGA
AGCACGCTGCACCTCCCTGGGGTCCCGGGAACCCGCACGAATCTGTGCATA
GGGAACAAAACCGAAACACGGTGGTGGCCTTGAAGTGGTAGAATTATGAGT
GATTTTCCCGACTTTATGTATTTTCTTAAATGGTCGTGTT

[0678] In some embodiments, the intronic domain that promotes trans-splicing primarily in the liver comprises or consists of sequences from the gene ECI2. In some embodiments, the sequences from gene ECI2 comprise or consist of:

(SEQ ID NO: 622)
GGCCCCGCCCCCGCATCTGAGCCCCGACTCCTAACCGCCTAGAGCTCCCGC
CCCGCCCACGCACCGACCCCCCCGGCCCCACCCCCGAGCCCCCGCAGCCCC
AGAGGAGGCCACGGGCTAGCGATGGCGAATGCGGCGTGGCTACGCTCTCAG
CCTGGCCCCGCCCCAACCCTGGCCCCGCCCATGCCCCAGGCTCCTGCCTGG
GCTCTGCTCTCGGCCCCGCCCCGCACCCAAGCCCCGGCCCCACCCCCGAGC
CCCCGCAGCCCGGGAGCCTAGGCCCCGCCCCCGAGTCCCGGCTCCACCCCC
GAGACCCGGCCCCACCCCCGAGCCCCCGCAGACCGAGCTAGGCCCCGCCCC
CGAGACCCGGCCCCACCCCCGAGCCCCCGCAGCCCTAGAGCCGCCCAAGGG
ATGGCGATGGCGTACTTGGCTTGGAGACTGGCGCGGCGTTCGTGTCCGAGG
TAAGCTTGGAGTCCCGGCCGTTCGGCCCATGGTCGCCCGC

[0679] In some embodiments, the intronic domain that promotes trans-splicing primarily in the liver comprises or consists of sequences from the gene ALDH5A1. In some embodiments, the sequences from gene ALDH5A1 comprise or consist of:

(SEQ ID NO: 623)
TGTTCTTTGTGCTTCTTGTATTTGGATGTCTAGGTCTCTAGCAAGGCTGGA
GAAGTTTTCCTCGATTATTCCCCCAAATATGTTTTCCAAACTTTTAGAATT
CTCTTCTTCCTCAGGAACACGTATTATTCTTAGGTTTGGTTGTTTAACATA
ATCCCAGACTTCTTGGAAGCTTTGTTCATATTTTCTTATGCTTTTTTCTTT
GTCTTTGTTGATTGGGTTAATTTGAAAACCTTGTCTTTGAGCTTTGACGTT
CTTTCTTCTGCTTGTTCAATTCTATTGCTGAGGCTTTCCAGAACATTTTGC
ATTTCTATAAGTGCACCCATTGTTTCCTGGAGTTTTGATTGTTTTTTATTT
ATGCTATCTATTTCATTGAAAACTTCTCCCCTTATTTCTTGTATCTTTTTT
TTTTTTTTTGTGACTTCCTTAAATTGGGCTTCGCCTTTCTTTGTTGCCTCC
CTGATTAGCTTAATAAATAACTATCTGAATTCTTTTTCAG

[0680] In some embodiments, the intronic domain that promotes trans-splicing primarily in the liver comprises or consists of sequences from the gene ALDH5A1. In some embodiments, the sequences from gene ALDH5A1 comprise or consist of:

(SEQ ID NO: 624)
TGAGCTCATGTGATTTTTGGGGGGTGTTAAAGAATCTTGTTTTTTCATATT
ATCAGAGTTGGCTTTCTGGTTTCTTCTTATTGGGGTAGGCTCTGTCAGAGG
GAAGGTCTAGGGCTGAAGGCTGTTGTTCAGATTCTTTTGTCCCACGGGATG
TTCCCTTGATGTAGTAGCTCCCCCTTTTCCTAGGGATGTGGCTTCCTGAGA
GCCGAGCTGTAGTGATTGTTATCTGTCTTCTGGATCTAGCCACCCAGCAAG
TCTACCAGGCTCCAGGCTGCTACTGAGGGTTGTCCGCACAGAGTCCTGTGA
TGTGAACCATCTGTGGGTCTCTCAGCCGTAGATACCAGCACAGTATTTGGG
GTGTCTCCCAGGTCCTGCAGGAGCAATCTGCTTCCTTCACAGGATCTGTAT
GCTCTCCCAGTTTTCCTGATTTATTCCTGCAGTCGTTCTGGAGCAAAAGTT
CACAATGCAAGCCTCCACATGCTGTTTTGTCCATCCGAGT

[0681] In some embodiments, the intronic domain that promotes trans-splicing primarily in the liver comprises or consists of sequences from the gene APOM. In some embodiments, the sequences from gene APOM comprise or consist of:

(SEQ ID NO: 625)
CAATCCACCGTGCCCCAGCACCTGCATCATACCTGTTCTAAAGCATTTACC
AAGTTGTATTGCAATGGTTTGTCTACACAGCTAGTTTTCCCTCTAACGACT
TCTTCAAGATCAGGGGCTATGTCTTATTCGTTTTTTTATGTCCCCGGGGAT
TAGCTAGTTCTTGGGAAACAACTGGGACTTGGGATTCAAAACAGTTTGCTA
AGTGAATGAATGAGAGGCCCAGTCAAGCTACTTCCCTTCAGTGCTGCACAG
TGCAACAAATAACCAGCTCAGATACAGGTTCAAAGACCACAGGCTTCTCCC
TGGACAGCTCAGCTCTCCTCATAACTCCTGAGAAACCCTGGACATGCCAGG
GTGTACTATGGAGTGGTTGCATCCGGAAGAGGGGGAGGAAGTCCCAAACAC
TAAGTAATCCAGGTTTGGGTTGGAAAACAAGGTTGAAGTTACTCATTAGCA
GGTGAAAGGGTCAAGGGTCGAACGCAAGGGAGCTGAAAGC

[0682] In some embodiments, the intronic domain that promotes trans-splicing primarily in the liver comprises or consists of sequences from the gene APOM. In some embodiments, the sequences from gene APOM comprise or consist of:

(SEQ ID NO: 626)
TATGGACTGAGATTGGGGGAAGCCTATGGTGGAGGCTCTGAGGGACTTG
GGTGGATGGCCTAGGATGACTGGAGACCATCTTGGGAAAGGAAGAGAGG
AAGGGGGTGTGAGTGTTGTGATAATGAAAGCAAGAAGAAAAATATCAGT
ACTGTGGCCATCAATGCAGAGGCATGGCAGAATTGGGGGGTGGGGTGGT
TACCCAGGTTGACTGGGGAGGGGCAAAGAGGAAAAGTCATTTAATGACT
CTTTGTCATGGATCCAATCCCCAGTTGGAAAGAGGAAGGCAGCCAACAC
CTCTACCCCTAAATCTTGCTGTTTTGACTGATGAAGAGGTTGAACCCAT
CCTGTGCTGGAACCCACCCTCTTTTGCTCCCTTCATTGTCTCTCCAGTT
CCCAGAGGTCCACTTGGGCCAGTGGTACTTTATCGCAGGGGCAGCTCCC
ACCAAGGAGGAGTTGGCAACTTTTGACCCTGTGGACAACATTGTCTTCA
ATATGGCTG

[0683] In some embodiments, the intronic domain that promotes trans-splicing primarily in the liver comprises or consists of sequences from the gene FKBP5. In some embodiments, the sequences from gene FKBP5 comprise or consist of:

(SEQ ID NO: 627)
GTAGGGACCCCATGGAGTACGTGACGCCTGGCCCTCCAGCTGCATGCTC
CAGTTATCAGGACAGAGACCCCTCCCCACCCATTCCCAGGCTTCCCTGG
CTCCCTGCTCTGCTGCTGGGAGGCCCTGTCACCACACATGCGCGTGCAC
GCACTAACATACACACACCCCTCTCAGGCACCCCCGGAAGACCAGCTGC
AGCTGGGGGTGGGGGTGCACGGAGCACAGCCAGGGTTCTCAGATCCCTA
GCCTGCTCTCCCACCCCGCCCTAGCCCCCAACTGCCGAGCTGCTTCTAG
TTTTAAAGCAAAACATGACTCTGTCCTTCCTGCTGCTCAGTGGCAGCAA
CACTGCCTGGGGTTATTTTTAGCAGGGATGCAGGGAAGGCACAGTTCTC
CTTGACTTTAACTAGGGACAACCCCCACCCCTCAGCCAAGACTCACTGG
AGGAGGCCGGGTACGGAAACCCCCCTCCCAGAAAGGGGAAATGGTGTGT
TTTCTGTTC

[0684] In some embodiments, the intronic domain that promotes trans-splicing primarily in the liver comprises or consists of sequences from the gene FKBP5. In some embodiments, the sequences from gene FKBP5 comprise or consist of:

(SEQ ID NO: 628)
GGACAGTCATCTTGGACATGCTCTGTGTTCCATATCATGACTTCAAGCC
TTGCCTTTTTCATGTACTACCAGTGGGATCCTAGACTAGCACTTTACCA
CTTTAAGCCTCAGTTTCCTAATTTGTAAATAAGGAGTAATTGTAATCAT
TCCAATATCACAGGCTTGCTGGGAGGATTAAATGAGATCATCCACATCA
GGGTCAGCACAGTGCCCGGAATGGGGTACCTGTGAAATTAATGGTGATT
CTTCTTTATTGTTACCTTGGAAAATGGAGGCCAACTGCAGGATGATCGT
GGCTCCAAGGAGCTGGGGACCCAAGACATGCACAGAGAAAGAGAGACCA
ACAATGTGAGGCCTCTGATGCATGAGACAGGCAGGGGAGTAGTGGGAGG
AGAGAGCAAGAGTGAGCAGCCAGGAGGGCCTCTTCCCTTCCCTTTACTC
AGCCTGTCACTCCTCTGCTAGGATCCTGCATTGACACATCTTGTACTTC
CTGTTTCCA

[0685] In some embodiments, the intronic domain that promotes trans-splicing primarily in the liver comprises or consists of sequences from the gene SLC22A7. In some embodiments, the sequences from gene SLC22A7 comprise or consist of:

(SEQ ID NO: 629)
AGGTGTGTCTTAGGCCAGGGCATCAGCTCCCAGCAGGGGAGAGGGATGC
GAGGAGGCCTCATGGCTCAGCAGAAAGAAACCTGGTTAGGATCCAGCTT
TCAGTCCTGAATCCTGGGCTGTCGGCCAGGCCATGGCTGTAGCTGCAAA
TAGGCAAGGCTGACCTAAGGTCTCACAGGACAAAGGGCACCCTGGGAGA
GCTGGCCCCAGGCCCCAGGGGCCTCCTCTTCTTAGGGATCCTGGGAGCT
CTGCTGACCAAGGGGCTAGGGGCTCACCTCCTATGCCATCACCCAGCTA
CCTCATCATGGTAGCCTTGGTCCCTGAACACTAATGGGTAAGCCCCAGA
GCCACGAGCCAGTGACCTCTGAATGGATGGCTTCCCCTTCCCCCAGGCA
CCAGGCAAGACAGGTAGAGGTCCCTGGAGACCTGATGGCTGGGGAGGGC
CCAGTCCTGGGCCAGCCCCTGAGGGCTGGATTCTGGCTGCAGGCTCTCC
AGTCCATCC

[0686] In some embodiments, the intronic domain that promotes trans-splicing primarily in the liver comprises or consists of sequences from the gene SLC22A7. In some embodiments, the sequences from gene SLC22A7 comprise or consist of:

(SEQ ID NO: 630)
TACTTAAGCCCAGAAGTTGAGAGACATGTGAGAGGGATGGGCCTGCCAT
TGCCTTGGGTGGTTACTGTGTAGGCATTAGATGTATTACTTTACCTCTT
AAAGTCTCAGTTTACCAATCTGTAGATGGGGGCTATGAATATAAGGCAC
TTTTAGTTCATGGCTTGTAGTAACAGGATCCTACACAAGAACTGTTATC
ATCATCATTAATTGGGAGGTGATTAAGGCAGGGAAGGGCTAAAGTGGCT
TCAGGGAGTTGAGACAAAGAGCTGAGAAGGCAATTTCTGCAGCAAGAGG
TGGAGAAACAATAGAGGCCTTCTTTTCTCCCTTCCTCTTTTCCAGTCCC
AGGTCGGTATTTACATAATCCATCTGGAGGTGGAATGTCGGTGGAGGCA
GTCTCCCTGGGAGGCAGCAGGTCGAGGCCTTCCTTGGGAAGAAGCTGAG
GCTGCAGGACTGGGGAGGGACAAAGTTTCCTATTCCCCAAGCTGGCGTG
AATCGTTGG

[0687] In some embodiments, the intronic domain that promotes trans-splicing primarily in the liver comprises or consists of sequences from the gene MLI P. In some embodiments, the sequences from gene MLIP comprise or consist of:

(SEQ ID NO: 631)
TCACTACAGATGCTCCTGTATTGTTGCTTACAATTTATATACTAAGGAT
AAAGTTACTGATATTTTGAAATAACTGTGTGTTTTCTAGTTCTTTATTT
GGACACAGTGTTTGCATGTATTTATACCTCTAAATGTTCTCTATGAGCA
TGACCAACTGATTATTGAGATTGGCAGGTGCTAGCGCCCTTCAATCAGC
TTCTCATTGCTGCACAATCTGGCTTTTCTCTTCTTTTCACAGAATATAT
AATTGGAATACATGCATGAAAAGAAAAGAGGGAAAACACATATCAGTGG
CTTTTTTTCTTTTTCTTTTTCTTTTTTTCACTTCTACTGATTCCATTTC
AGCAGTTAGTATGACCTCTCATAATGTTCCAAATCTAAAAATTGTCAAA
ACAGAAATCTACTCTTCGGAGCTGACACAATTCCTCAATTTTGGAATGA
CTCTGCTTTACCTCTTTTTAGAATTTCTTCTTTCTGCGTGAGTGTGTGT
GTGTTGTTT

[0688] In some embodiments, the intronic domain that promotes trans-splicing primarily in the liver comprises or consists of sequences from the gene MLI P. In some embodiments, the sequences from gene MLIP comprise or consist of:

(SEQ ID NO: 632)
TAAAAGGAAGTCTTTGCTTAATGCTTTCAGTAACTTTTAAAAGCAGTGT
ACGGTGCTGGTGGTATTTGCTGCAAGGATGTGAGGGAGAGCTGCCCAGT
GAAGATAAATTTGTATGTATATTGAAATGAAATGCTATCTTCACTTAGA
GAAAAGGGTGAGCTGATAAAGACAAAACTGCTCATTGGGCAAAGAAAAT
GCTCAGGATTGCCCTTGGCACAGTGATAATGTAAGATACCCTGTAATGC
CTTAACAGGAGGCTAGAGGCCATCTGCGAGTGTGGGTGTCAACATCTGA
AGGAAGAGAACTTTTAGGGAAATATAAGAAAGGAAGGCATTACAGCCCA
AAACTGAGCAAAGGAGCTGTTAGCCTGCGTGGCATGCGGGAAAACAGTT
TCTCAAATTATTAGGCTATCCGGTGAGAAGATGACGTTCTTAGAGATTT
TGAGCATTTCAAAGTGTATTTAGAAAAAGATTTTAATCCTTTTATCTCA
TATTTCTAT

[0689] In some embodiments, the intronic domain that promotes trans-splicing primarily in the liver comprises or consists of sequences from the gene ENPP1. In some embodiments, the sequences from gene ENPP1 comprise or consist of:

(SEQ ID NO: 633)
TAGGAGCAGCGTGCCTATGGAAAATAGAAAATAGGTTCTTTTTGTTTTT
GTTCTTGTTTTTTGCTTCAGAAATAATTATAGAAATCTGTGTTTAGAAG
CAGTCCTAAGAAGTTACATGCAAAGAAGTACCAGTCTTGGAATGAGAGT
GAATCATACACATACACTCCCAGTTAATATCCTAGGTGGTTTGGGGCAA
ATAACTGGGCTTTCACATTCGGTCTAAAAATGTGATAAGACATTCTTCT
TTGCTCACATAATGATATTGTAATATATAAATAAGAAGAAACATTAACC
AAAATTTGGGTGACGGAAAAGATTTTGAAAAAAGTGAAGTGATAGGTAC
AGCTGAAATTCTGTCTTACCTATCAGATCTTCAACTAATATGAGTGCTA
CACCCATGTTTAACGAATTTAACCTTGGAAGTGAAAGAAGTTCTGCTCT
GCATATTAAATTTTTTGTTAAAGTTACAGCATGTTTTGGGATTTTTTTT
TTCTCCTAG

[0690] In some embodiments, the intronic domain that promotes trans-splicing primarily in the liver comprises or consists of sequences from the gene ENPP1. In some embodiments, the sequences from gene ENPP1 comprise or consist of:

(SEQ ID NO: 634)
TAAGTATATCTCTGTGATAACTTTGAATATGGTCATATTAAGAATACCT
TCCTTTAGGCCGGGCACAGTGGCTCATGCCTGTAATCGCAGCACTTTGG
GAGGCCAAAGTGGGTGGATCACCTGAGGTCAGGAGTTCGAGACCAGCCT
GGCCAACATGGTGAAACCCTAAAAATACATATACGATACTATACTATAT
CTATACTAAAAATACAAAAATTAGCCTGGCTTGGTGGCAGCTGCCTGTA
ATCCCAGCTGCTCTGGAGGCTGAGGTACAAGAATCGCTTGAACCCAGGA
GGCGGAGGTTACAGTGAGCTAAGATCATGCCACTGTACTCCAGCCTGGG
CAACTGAGTGAGACTTGGTCTAAAAAAAAAAAAAAAAAAAAAAGAATAC
CTTCCTTTAAATCATTATATCGCTAAACTAAAGGGAATCACAGTTAATT
TTTTTATGATTAAATCTCCAATGCAGAGCTTTTGTACACAAATGGATTT
TATGGGACT

[0691] In some embodiments, the intronic domain that promotes trans-splicing primarily in the liver comprises or consists of sequences from the gene VNN1. In some embodiments, the sequences from gene VNN1 comprise or consist of:

(SEQ ID NO: 635)
GTAAAGAAACAACTTGTGAAAAATTCACTAGTAAACATCAACTTGATTT
ACCTGGGAAAACTTTGTTGATGATCATTGCATAGATCCATGATCAATTC
TTAAGTTTCAGTATAGCTTATTTTTCATCTACTATGGGTATATTTACTG
GGAGAGCAAATATGAATTATGAAGTCACAGAAGTCAGAGCTAGAAAGTA
GCTTAGAAATCATCACATTCAGTGTGAACATCTCTGGTCTCTGACTCCT
CACCAGTGAACAGAAAAATATTTCCCTGTGTAGGTCTGTGATTTGAAAA
CTATATGAGTAAATGGCAAAAGAGAGTCACATCAGTTTAAGATTAATAG
TTTTCCTTTCTCATTGCTAAGATAGCTGATGAGGTTAATGTAGTAAAGT
CCTTAAAGTGTAAGCTGATTGTAATCTAAGAGGTGATATGGCAGGATTT
TAAGTGGTTTAAGTCAGGTCTCGGCTACAGAGATATTAAGTGTGGTGAA
AGCAGCACT

[0692] In some embodiments, the intronic domain that promotes trans-splicing primarily in the liver comprises or consists of sequences from the gene VNN1. In some embodiments, the sequences from gene VNN1 comprise or consist of:

(SEQ ID NO: 636)
CATCTCTACTAAAAATACAAAAATTAGCCAGGCGTGGTGGCAGATGCCT
GTGATCCTAGCTACTTATGAGGCTGAGGCGGGAGAATCGCTTGAACCCG
GGAGGTGGAGATTGTGGTAAGCCGAGATCTAGCCATTGCACTCCAGCCT
GGGCAGCAGAGCGAAACTCCATCTGAAAAAAAAAAAAAAGAGAGAAAAA
AAAATGCTTGACTAGAAGCCCAAACCTCACCATTATGTAACATATCCAT
GCAACAAACCTGCATTTGTACCCTTTGAATCTAAAATTAGAAATAAAGA
AAAGAAAAGAAAAAGAAAAAGAAGTGACAGTGCACTGAAAAAAAAGGAA
ATTAAAATGCTTTGGAAAAGAAAATAAATTATAAAAATATAGAAAACAA
AATAAGATTTAAGGGGTGTGGGGGAAGCCCAAATAGTTGTTACTCAGCC
ACTCAGCTCCTCAGCTCCTCTTGCAGGCCCCCCTTTGGATTAAGTTGCA
TTTTTAACA

[0693] In some embodiments, the intronic domain that promotes trans-splicing primarily in the liver comprises or consists of sequences from the gene SGK1. In some embodiments, the sequences from gene SGK1 comprise or consist of:

(SEQ ID NO: 637)
GTTCGTACTTACCGTACTATATTTTGCAGATGCCTCAAAGGATTTGGGG
TTACTTGGCATGGGGAAGGCACATAAGGTGGGGTGTAGGAGAGGGTCTC
TGGTTGTAGGTTTCTTAATTTAATGTTTGAAAACAAACATGCAAAAGTC
TGTGTGCAGGTTGATGTTTCTGGGCAGCCTGAGCAAAATTTGCTCTCTC
AAGAGGGAAAGGAACCAGGTGGGAGCAGAGCTAGGCTGGGCTAGGCTAG
TTGAATGGTGGGACATGACATACGGGTGGCACTGGCAATAACAAAGTCA
CATTCTATGAAGATTCCCTGCAAGAGGAAGCAGACATGGGCCAGTTACT
GTGATTTGAAATTGCCTAAACATTGCTTTAGGTTGGCATGTCAATTTCA
GGTACTAGTGTTTTTTTTGTTTTTGTTTTTGTTTTGTTTTTGTTTGTTT
GTTTGTTTTGAGACGGAGTCTCGCTCTGTTGCCAGGCTGGAGTGCAGTG
GCGTGATCT

[0694] In some embodiments, the intronic domain that promotes trans-splicing primarily in the liver comprises or consists of sequences from the gene SGK1. In some embodiments, the sequences from gene SGK1 comprise or consist of:

(SEQ ID NO: 638)
AGTAGGTTGCTGGGACAGAACAGGGGGCGCCTGCTCCACCCATCACGTA
TCCGGTTGGAAGAAAAGCCAGTCTCAACAACTTGATTCTCTCGGTTAAA
TGATAAGTTTAGCCGACCATCCGTCTCCAAGTGCTGAACATTAGGGTAG
GGGAGGAAGGAGCACATCAGACGTTCCCTTTCTTTTCCAACCACAAATC
ATACGGTTGCATCTATTCTCTATTCCGCGTAGAACCCTCCGACCTGAAT
GCCACGTTCCTCCCGGAATGCATGCCACAGAGCCTCTGAGAAAATAAAT
CCTGTGCATGTGTTTTGAATTTTTTCCGGACTGATTTGTGAGGATAATC
AGTTAAGTTACATTTCTTGTGTGCGTGCTGGGGGTGTAATAAAGCTAGG
ACACTGATGACTGTAATTTTCTGAGTGATGTCGCAATGGGGAGAATAAA
TGGCCCAGTGTTGAACTTTGCAGCTTGCTCCCTTCCTGTACTTAAATTG
CCTTGATAT

[0695] In some embodiments, the intronic domain that promotes trans-splicing primarily in the liver comprises or consists of sequences from the gene PLG. In some embodiments, the sequences from gene PLG comprise or consist of:

(SEQ ID NO: 639)
ATATCCCCAGAGTGGGTGTTGACTGCTGCCCACTGCTTGGAGAAGTATG
TTTAGGGGACAATTGACATGAAGTCTTGTCTTAAATACTTTTTCTGTCC
TTCTTTTCCTCCTTTCCTCCTTTCCTTTCTCACTCTTCCTCCCTTCCTT
CTCTGGCTGTGACACTAGGGACCAGGCCAGGGCAATTGGATAAGAGAGA
AGGGAAGGGTTTCTAGAAAGAAACTGCAGAGGAAAGACACAGTACAGAT
GATTTTGTGGGCCTGAATAAACTGCAGAACAGAGCTGTTCACTACCATA
GGCTGTATCAGTCTCTGCCCAAACAGCCCAAGAACATTCCTTAACTGCC
TGTTTCAAGCAAATCATGAATTTTGCTTCTTGCCACTCAGAAGTCACTA
ATTCTGAGTGGCCAAGGGTGTCAGGGAGACAGCACCAATTTCATGGCAC
AGAGGTTACCTGAAGGGGCTGGACCATATTTTCCTCTTGACGTCCTCAT
CTTTTCTAG

[0696] In some embodiments, the intronic domain that promotes trans-splicing primarily in the liver comprises or consists of sequences from the gene PLG. In some embodiments, the sequences from gene PLG comprise or consist of:

(SEQ ID NO: 640)
TACTCGTTCACCTGTGGTCTTCACCCCACGCTGGTGAAGATATTTGCTT
TATGTCTGGGTTTTATGGGCCATGGCCACTGCATGGCAGTGGGGAGGAA
CTGTCTATCACATGAAAGGCTCAAGGGCTTTGGGGACAGCATCAATCTT
CAACCCTAGCCCTGCCACATGCTAGCTGTGCTCTTGAGAAAGGCAGCAG
GACTCCGTTTTCTCATGTGGAAAAAGAGTTGAAATGAGGTACTCTGTTA
CTCCTAGAACTCACTTAATGTTCACCAGTTCATACACATTCATGATCAG
AGAACGATTCAGTTATTCCAGGCTGACAATTCCCCCTTCATCATAATAT
GTTTAAGAGAATCATATAAGACTATATTTGTTTCAAAGCACTTTAAAAA
CCACAAGATCGAGTTGGGTGTCTGGTGTGGGTGCCTGTAATCCCAGCTA
CTTGGGAGGCTGAGGCAGGAGGGTCACTTGAGTCCCGGAGTTTGAGGCT
GCAGTGAGT

[0697] In some embodiments, the intronic domain that promotes trans-splicing primarily in the liver comprises or consists of sequences from the gene ABCB4. In some embodiments, the sequences from gene ABCB4 comprise or consist of:

(SEQ ID NO: 641)
GGTCTCGAATCCTGACCTTGTGATCCGCCTGCCTCGGCCTCCCAA
AGTGCTGGGATTACAGGCGTGAGCCACCTTGCCCGGCTGATAGTG
GTTATTTTGAAGTAATGGAATATTTTATTCTAAATTTTCTAAAAT
GATTATATATTTTATAAAGTAAAGCATTCAAAAGAAAAAAGCTGC
ACAAATTACATTTTTAGCACATTAGGAATGAAAAACTGGAAAATA
CTCAAAAGGGAACTAGTTAAACAGAAGATTAGAAAATTTAAATAC
TTATGAATTTTTTTACAGCATGGGAACCCATTTGTGTTATATTTA
AAAAGCAGAACATAACTATGTAGATTAAATGTTGATTATACAAAA
TACACATGCATAAAGTTCAAAGATTCTAAGATACTAGAAATTAAA
AGTTGATTAGAAAGGTAACATTTTCAAATTTACTTGAATGTTAAA
ACTAATTTATACAATTTTTGGGATAAGGTGTCTGTCTGATTTATC
AATA

[0698] In some embodiments, the intronic domain that promotes trans-splicing primarily in the liver comprises or consists of sequences from the gene GSAP. In some embodiments, the sequences from gene GSAP comprise or consist of:

(SEQ ID NO: 642)
GTACGCAAGTATTTCTCACTTTTATCATGGTGTACAAAGAGTGGA
AACAACTCTGTTGTAGCAAAACCCTTTTGAAATGCACTAGTTCAA
ATCAGTTCTCACCAGCTTCAACACCATCTAGCTTAATTCTATACT
CAGCATTTAAAGTTATGCCCCCCTGCATATGTACCCTTTAATGTA
TAATAAAAGCTAAAATTAAAACAAAGTTATGCCCGTTACTTTACC
CATCCTCTTTCCCTGGCACATGGTTGGTGACAGGGGAGGGACAAA
TGAGCCCAGTACTGCCAAGAAGGGGAATTTCACTTAATACAATGT
GTAACATATGTTCCTACTCTGATTAAATTCTAGGCATTAGGCCGA
TGGTCACATTCATATTTATGGGGCTTTCTACAAGGCATAGCATTT
CATGATTAGCATGAACCCTTGTGTAGTACTCAAAGCCACTGCTTA
GGACAAATGGAGCATCACAGATGAGCTCCTTGGCTGACATGCTGC
TTTG

[0699] In some embodiments, the intronic domain that promotes trans-splicing primarily in the liver comprises or consists of sequences from the gene GSAP. In some embodiments, the sequences from gene GSAP comprise or consist of:

(SEQ ID NO: 643)
TGAGGACACTGCAATTTGGAGAGGGTGGGTAACTTGTGTAGGGTA
ACACAACTAGTAATGTATAGAATCTGGACTTGATACCAGTCTTAC
TTCACAGCTCATGATCATGACCTCCATTCTGTGTCTCTTTTCTTC
TGACTGTCCACTGTTGGCTCTTGCGTTGTGACAGGCCTGGAGCAA
ACCCTGTAGCACTTTACCTTCACTGATGGATGGGGGTCTGTAAGT
GTGAGTGGTGGGGCCAGTTAGCTGGGCTGGGGAGGCTGAGCTGGG
GCACTGCCCACACAAACAGAGGATGCTTTGTTAGTTTCTGGTGCA
CATTTTCAGTCTTTCTATTTTGGGTTCAGTGCTTCAGAATTGACC
TCAGAAAGGCTAGTTGTGTGTCTGGATGCAGCCTGAATGCCAGCT
GCCCTGAAATGCTTATCTGAGTTGTGGAGGCCTAGCTGTGGGGCC
CTTGAGGGAAGGAATGGAGCAATGGTTAATGGACTGTCTTCACCC
TCCA

[0700] In some embodiments, the intronic domain that promotes trans-splicing primarily in the liver comprises or consists of sequences from the gene ABCB4. In some embodiments, the sequences from gene ABCB4 comprise or consist of:

(SEQ ID NO: 644)
ATCTGACTTGTAAAATAAGTTTCTGGTTTGTCATCATAAAACATA
GGTATGTCTGTCTCATTCTAGATCAATTTAGAAGACCCAATTTGG
GGTTTATTACGGCATTTGAAATTTGAGAGTTAGAAGTGACACCTG
TCTTGATGAAGTATTGAAACAACAGGCTAGCTCTCCCTAAGTTAT
TAGAAACATCCAGAAAAAGAACAAAATTCAAGGTAAGTACAGGTG
TAGAAATATAGAAGCCACAGACATAGGGAAATGGTCTTATGGTCC
TGAATGGGTTGGGTAGACAGGAAAGTTTGGGAATAATTTTCCCAA
GTACAAAAGAAAAATAAATTGTTCAATAGCCTCATCTCTCTTGGT
AATTTTCTAAATCATTCTATTGTGGAATCAAAGTTTTTTAAATGA
ATGAATTTCCAGCTTTATCATCCAACATCAAGAGAAAATGAAATT
GCCCTACCGAGCTAACTCTGAAAGCACATATCGGTTCCATAAAGC
AAGA

[0701] In some embodiments, the intronic domain that promotes trans-splicing primarily in the liver comprises or consists of sequences from the gene STEAP1. In some embodiments, the sequences from gene STEAP1 comprise or consist of:

(SEQ ID NO: 645)
AAACTCTGTGTTGAAAAAGTCATCTATTTTAAAATTTTTATTATA
ATTACACTAGGGCTTGGTTGTCAGTCGGTTTTATATTGAGAAATG
TTTTTTAGGCTGAAAATAAGGTACAACTTTAGCAACATAAGAAAC
ATTTTGTTCATGGACGAGGCCATATTTCAAACTTCTACCACCCTC
ACAAGATTACTTTTTAATATTGTTGTTCTTCTCCTTGTTTACCAA
TATGCATGCACATTACAGTTCTATCCAAGTAAACCATCAAATAAT
TATTAGAAAATTAATAGATTATGGAAGTGTTGCATTCAAGAAAAA
AAGTGATAGCTCCTATGTCATTTGTCTTAGAGGAATGCAAAAAAA
AAAAAAGAAAAAGTCATAAATTTGTGGAGACCTGTTATCAGGGCT
TCATAGTAGGCACAGGGAAGAGTGTAGAAGGAGATTCACATTCAG
GAAATAACTGTTGTTTGCATTTCTTCTTTCTTTATTTACCTTCTG
GTAG

[0702] In some embodiments, the intronic domain that promotes trans-splicing primarily in the liver comprises or consists of sequences from the gene STEAP1. In some embodiments, the sequences from gene STEAP1 comprise or consist of:

(SEQ ID NO: 646)
TAAATAATATATAAAATAACCCTAAGAGGTAAATCTTCTTTTTGT
GTTTATGATATAGAATATGTTGACTTTACCCCATAAAAAATAACA
AATGTTTTTCAACAGCAAAGATCTTATACTTGTTCCAATTAATAA
TGTGCTCTCCTGTTGTTTTCCCTATTGCTTCTAATTAGGACAAGT
GTTTCCTAGACATAAATAAAAGGCATTAAAATATTCTTTGTTTTT
TTTTTTTGTTTGTTTGTTTTTTGTTTGTTTGTTTGTTTTTTTGAG
ATGAAGTCTCGCTCTGTTGCCCATGCTGGAGTACAGTGGCACGAT
CTCGGCTCACTGCAACCTGCGCCTCCTGGGTTCAGGCGATTCTCT
TGCCTCAGCCTCCTGAGTAGCTGGGATTACAGGCACCCATCACCA
TGTCCAGCTAATTTTTGTATTTTTAGTAGAGACAGGGTTTTCCCA
TGTTGGCCAGGCTGGTCTCGATCTCCTGACCTCAAATGATCCGCC
CACC

[0703] In some embodiments, the intronic domain that promotes trans-splicing primarily in the liver comprises or consists of sequences from the gene PON1. In some embodiments, the sequences from gene PON1 comprise or consist of:

(SEQ ID NO: 647)
GTAACAATATTTACTATTTATTAAAACCAAAACCAAACTTAAAAC
AAAAACAGAAAAACATGCCAATAAATGAATTATTTTTTCTCATTC
AAACAAAGCATAGTCATGAATAATGTTCTTACTCTGGGTTTTAAA
CTTACCCTCTATGTTAATTGAACTTTATAGTAAAACCACTTAAAT
ACTTGAGAATGCTAAAATATTTAAGATTTGTAAAGCATCTAATTT
TGTAAAATACTAACATTCACATTATCCCTATAATTACCATAATAA
TAATATCCAGCCCTGATCATTATAGCTTTTCCATTTTAAACGATT
TTCAAGACTCGGGCATTTACAGGAACAGATTTTTCTAACCCAAGG
CATCTGTAAGCTATAGGTCCAGTGACAGAAAGTCACCATGGTCAG
CTTTCTGCCGGTCCCATTATCTTCAATGCCTCCTGTCCGCTGGTT
CCTCTGTTCTGTGTTCAAAATGCTCCTCTGCATGTTGGTCCCTTT
CAAC

[0704] In some embodiments, the intronic domain that promotes trans-splicing primarily in the liver comprises or consists of sequences from the gene PON1. In some embodiments, the sequences from gene PON1 comprise or consist of:

(SEQ ID NO: 648)
TCTTATATGGGAACACAATATATAAAACAACAGCTTTATTGTTTT
GATTGAAGGCTAAGAAAGGAGTAGTTCCTCTGGCCCACCAAAACT
CTGTCTTTGAGATGCTTCCAAGGACCTACCAGGGAACAGTTTAAA
AGCCATAAGCAATATTCTCTCTGTATTCCTTGCTTATATCATTGA
AGACTATTATTAATTGCCTTTTTGGTCTGCTCTTCCATTTTTGAT
CTTTCTCATGGGCTGGAAGCTGTAGTGTCGTGCACATATGACTTT
GCTGCAGGGGATGAAAGGGTTTGTGTGGGGTGGCCTAGTGGAGCA
TGTGGCTTCCAGAAGACTTCTCCTGGGGACCCATTACAGAAGCTA
ACTAAGAGGCTTCCTATGTGGCCATCTGGCTAGCCCTGTGGTTTG
GAGCAGTCAACATGAACCCATGGGCCATGCAGCGCCTCTATTAGC
ATTTGAAGTACTGGTATTGTGCTTGATTTTTCTCCTCCATGGTTT
ATAA

[0705] In some embodiments, the intronic domain that promotes trans-splicing primarily in the liver comprises or consists of sequences from the gene TFR2. In some embodiments, the sequences from gene TFR2 comprise or consist of:

(SEQ ID NO: 649)
GTGAGTGCGCGCGCGGGCGGGGGGCGCGCGGGGAGGGGGACGCGG
CTCGGGGCGCTCACCAGCCCCGCTCCCCAGGGCTCACCCCAACAC
CCTGCACTGGGTCGATGAGGCCGGGAAGGTCGGAGAGCAGCTGCC
GCTGGAGGACCCTGACGTCTACTGCCCCTACAGCGCCATCGGCAA
CGTCACGGTGAGCACCCCCTGCCCGCTCCTAGGATGGGGCGCGGC
ACGAGCCCTTTCCTGGGTCTCGAAGGAGGGACGCGGGGAGCGCGC
CTCACCGTCCTCGTGTCCCCAGGGAGAGCTGGTGTACGCCCACTA
CGGGCGGCCCGAAGACCTGCAGGACCTGCGGGCCAGGGGCGTGGA
TCCAGTGGGCCGCCTGCTGCTGGTGCGCGTGGGGGTGATCAGCTT
CGCCCAGAAGGTAAGTGTCCCTGGACAGAGGGAGGGCTTGAGCCC
GGGAACCGGAGGGTCGGACTGCCAGTGAGAATCGTTCAGGGTGCT
GTGA

[0706] In some embodiments, the intronic domain that promotes trans-splicing primarily in the liver comprises or consists of sequences from the gene TFR2. In some embodiments, the sequences from gene TFR2 comprise or consist of:

(SEQ ID NO: 650)
AGTCTCCGGCGCCGCCCTGGTGGTGATGGGAGAAAATGGGTCCGC
GGAGGGCCCTGCACTGCGGCTCGCGCCTGTAATGCCAGCACTTTG
GGAGGCCGAGGCGGGCAGATCACCTGAGATCAGGAGTTTGAGACC
AACCTGGTCAACATGGTGAAACCCGTCTCTACTAAAAATACAAAA
ATTAGCCGGGCGTGATGGCACGTGCCTGTAATCCCTGATACGAGG
GAGGCCGAGGCAGGAAAATGGCTTGAACCAGGAAGGCGGAAGTTG
CAGAGAGCCGAGATTGGTCCACTGCACTCCAGCCTGGGCGACAGA
GCGACACTCCGTCTCAAAAAAAAAAAAAACCGCCCCTGCCCCTGG
CGACCCCACGTCTCTGGCATCCTTCCCTCTTCCCTCCCTCTCCTC
CGGGCGCCCAGAAAAGTCCCCACCTCTCCCCGCTTA

[0707] In some embodiments, the intronic domain that promotes trans-splicing primarily in the liver comprises or consists of sequences from the gene SLC39A14. In some embodiments, the sequences from gene SLC39A14 comprise or consist of:

(SEQ ID NO: 651)
ATCTCGGCTCACTGCAACCTCCGCCTCCTGGGTTCAAGCGATTCT
CCTGCCTCAGCCTCCTGAGTAGCTGGGATTTCAGGCACGCGCCAC
CACGCCCAGCTAATTTTTTGTATTTAGTAGAGATGGGGTTTCACC
ATGTTAGTCAGGCCGGTCTCGAACTCCTGACCTCAGGTGATCCAC
CTTCCTCAGCCTCCCAAAGTGCTGGGATTATAGGCTTGCGCCACC
GCACCTGGCCTACTTGTATGGTTTTTAGGCTTCCATTGCTGTTTG
CATCCGTCTCTCCATGGAAAAGGTGTTTCTCTTGGATAGCAATTT
TGATAGTTTCCCTAGGCTTCTCCGCAGCATCTGGTGAGAGATGGA
CTCAGCAAATGTTTACTGATGGGTTGGTGGATCTCAGTCTGCCCC
ATCACACCTGAATTCAGAACAGGGCCGCCCCAGGCAGCAGGAGTG
TCCCCACCCTCAGTAATAGAGGCCCTCGTCTGTTCTTGTTCCTCC
ACAG

[0708] In some embodiments, the intronic domain that promotes trans-splicing primarily in the liver comprises or consists of sequences from the gene SLC39A14. In some embodiments, the sequences from gene SLC39A14 comprise or consist of:

(SEQ ID NO: 652)
TGCAGTAGAACAGAAACTTGCGCGTCCTCTTTCCCTGGGGCGGCA
CAGCTGAGCCAATCCCCTCCTCCCCTACCCTGGGCTCCAAGGCAC
CCAATGACTGCCACCTGAGAAATGAACCTGTCCCTCGTATCAAAG
CCACAAACGACTTCTAACTCTGGATCTCAGGGCCCACCTCTCACT
CCTCTGGCCTCTGCAGGTGCTGTCAGATGCAAGGTTCTTCCAATT
TCCCTCCTCCTGGGGACTTGACAGTCTCCCCTCCCTTGTTAAGCC
CCATACATAAGGCATCAAGGGAAAGCAGCAGCTATCGACTGCCGT
CCATGCCTTTGGTGCTAAGTACTTGCTCTATTCTAAGGAGAAATC
CTGGCAGTACTCAGGTCTGGGCACCAAGAGCTTATCCATCTGGAA
TGAGATGGAAGGAAAAGAGGTTACCAAGTGATATGTAGAATTGGC
CTAAAAAGCGAGTGTTCTTTAATTTTGAGCAGGCCATCGTTTCTA
GCAT

[0709] In some embodiments, the intronic domain that promotes trans-splicing primarily in the liver comprises or consists of sequences from the gene RBPMS. In some embodiments, the sequences from gene RBPMS comprise or consist of:

(SEQ ID NO: 653)
CCTTAGGAGTCGCCCAGCAGCGAGACAGCTGTGGATCCCCTCCAG
GCGCATGGGAGGCTCACAAGGCAAGGACTCTGATGGTTTTGGCTT
CCACCTCCTGTACGGTGGCCAGTGCTGTGAGGGTGGTTGGTCCCA
CAGGGAAACCTGTGAACAGAGTCATGTCTGGGGCCCCAGGGACAT
GGCTTCAACCCCTCACCTGGCAGTCCTGCCTCCCAAAAGTAAGGC
AGGAGTCCGGAGATTCCCATTGCTTGCTTCTGTGAATCTCAGGTC
ACTTTAGCACTTGACCCCTGACCCCAGACTGCCTTGTCCTTGAGG
CCTGGGATTCCTAAGGTATATACTGTCTGCTCCAGAGCTGTGGCT
GTGGCTATCCGGAAAACGACAGCTTTGAAGGACTGCAGAGCTTGC
CTTTGGGGCTGTTCTGCCCAAGGCCTTCCATTGTTTTCAGACATA
AATGAAATTGTTAATCCTCTGACATTTACCTTTTCCTCTCAACCT
GCAG

[0710] In some embodiments, the intronic domain that promotes trans-splicing primarily in the liver comprises or consists of sequences from the gene RBPMS. In some embodiments, the sequences from gene RBPMS comprise or consist of:

(SEQ ID NO: 654)
TGAGGCTTTCTAGGAGCACCTGGCTTAGCTCTCACAGGAGGAGGG
GCGGACGGGGAGGCCAGGCCTCATGCTCACAGCGCCAGCCTCCTG
TGAGAGTGGGCTGGGTCTCCTTTCCTTTCCCAGGCCCTTCCTGGA
GGCGATTTCTTTCTTTCTTTCTTTCTTTCCTTTTCTTTTCTTTTC
TTTTCTTCTCTCTCTCTCTCTCTCTCTCTCCCCTCTCTCCTCTCT
CTCTCTCTCTCTCTCTTTTCTTTCTTTTCTTTCTTTTCTTTCTTC
TTTTTTTTTTCTGAGGCAGAGTCTCGCTCTGTCGCCCAGGCTGGA
GTGCAGTGGTGTGATCTCGGCTCACTGCAAGCTCCGCCTCCCGGG
TTCATGCCATTCTCCTGCCTCAGCCTCCCAAGTAGCTGGGACTAC
AGGCGCCTGTCACCACGCCTGGCTCATTTTTTGTATTTTTAGTAG
AGACGGGGTTTCACTGTGTTAGCCAGGATGGTCTCGATCTCATGA
CCTT

[0711] In some embodiments, the intronic domain that promotes trans-splicing primarily in the liver comprises or consists of sequences from the gene DPYS. In some embodiments, the sequences from gene DPYS comprise or consist of:

(SEQ ID NO: 655)
GTAAGTCTAAGTTCTTGTATTCCTTGGCTTCATTGTGGAGAAAAT
GCACTAACTTGCACAGAAATAATGCTTTGGCATTAATCAGCCGCT
TCTCCTTAGATGACTTCTTTAGCTGTGCTCAGGTATTTTGATCCT
GTACACAAGATAAAGGTTTTGATGTGCAAATATTCCTTTGTTTTT
CTTGGCATAGAGGATGTAGAAGTTGTGTTGCATTCTCTGACAATG
GATCTGTATATAAAACCAATATGAATTTACCACTTCAGTGCCTGG
CAAATGCCCGAGTTCACATGGAAGAAAGGTAAAGCGTGATGAAGG
AAATAAAAGGCTTAGTTTGAAAAGGGTTGAATTGAAAACTCAAAA
TAATTACAGCCTTTTTAAAGCTTTCAGATAGAAAAATTCCAGCAC
AAAGGATGTCACTTTCAGTTAGCCAAATTTTCCAGTTGAGTTCAT
CTTCAGCCTATCATTCCTAGTAGATTCCAGCTTTTTGTTTCCAAT
TTCC

[0712] In some embodiments, the intronic domain that promotes trans-splicing primarily in the liver comprises or consists of sequences from the gene DPYS. In some embodiments, the sequences from gene DPYS comprise or consist of:

(SEQ ID NO: 656)
GCACCACTGCACTCCAGCCTGGGCAACGAGAGTGAAATTCCATCT
CAAAAAAAAAAAAAAAAAGTGTTGTCACCTATTCTCACTCTATAA
TATTCTATCTAATGTCTACATGATTATCTCATAAATCTTAGGTCT
GTAATAAATAAGTCAGATCATAAATGTGGTATTGTCAAACTTTAA
AGGAGAATCGAAAATACCATTACCAAAATTTAGCTGTCACCTATA
ACAATTTTTGTGATTCTAGGATGAATGGGAAGAATTAGTGTGGAT
GCTAAGTAGTGGGGTTTCTGAAAAGTCATCTTCAGGCTTCCATAT
GTTACCCCATCATCTCCATCATTGGCATTATGACTGTTTAATACT
TACCAGCATCCTCAGATGCTCTACAATATAAGAAATTAGGTGCAG
TTCTGTTTGTTTAAGAGATGCAAGTCTTGTCATTTTATCGATAGG
ATACTTTTTAGTATTTGATCATTAGAATGATTCTTTGAATTGCTT
TACA

[0713] In some embodiments, the intronic domain that promotes trans-splicing primarily in the liver comprises or consists of sequences from the gene RCL1. In some embodiments, the sequences from gene RCL1 comprise or consist of:

(SEQ ID NO: 657)
TATTGGGATGGGTGAGAGGAGGAAGATGCTTTTTGGGAGTCAGAT
CTGTTTAATTTTGAGCAAGTGTCTTAGTTTTTTTGTCTTAGTTGT
CTTTAATGTAAGTCCTAGAACTCGGAGCCATGGCCCTCAACACAG
GGTTACTGTGAGCATAAAGTAAGGTGATAATAGATGTGAAAGAAC
TTTGGGAGCCGTGAGCTCTGTGGGATTATGTGCTAGGATGGTGAC
ATCTCTTGTGCTTTCCTGGGGACAGTGGGCAGCCTCAGACCTCAG
AAGGACAGCACCTGCTTGGTCCAAAGGGTATGAGATTCAGGACTG
TTTGTCTAAGCTGTCTGTGGTCAAAAGTACATTCTGGACTGAAGA
GATGGTGATGTAACTGGGCTGTGTGTGTATTGAAAAATCCCTCTT
TGCTCTTTCCTCATTTCAGGTTTGTCCTTTGAGTCAAGTTAAATA
TTTATTGAGCATTTCTGAGTACAAAAGTGGTGTATTGGAGAGTTG
GGAG

[0714] In some embodiments, the intronic domain that promotes trans-splicing primarily in the liver comprises or consists of sequences from the gene RCL1. In some embodiments, the sequences from gene RCL1 comprise or consist of:

(SEQ ID NO: 658)
TAAGTTCAAGTGGA
GCTAACACTTGGGTGCCGGCTGGAGGGTTTCAGGAGAGAGATT
GGGACCTCGGGCTGGGAGAATGGGGCAAAGCAGCTCAGGTTGAGG
AATTTGGTCAGTTTGGATGGGTGGAAGGAGTTGATGGTGCAGAGC
TGAAGATGGACACAACTGAGCAGGCTGGGGGCTCTAACAACAAGA
TATGGGAGGACCAGGAGCCACCGAGAGACTGTCACCAGCATGAGG
AAGATTGGTCTTTTAGTATGAAGTTCAGGATGGGTCAAAAAAGGG
AGCTAGATACCAGATCAGGTCATGTATCGTCTCTGAGCACTTTGT
TTCTGCAGTTCAGATGAAAATTAAATATGTTATTGTCAGCAGTTC
TTGAACATTGGGCTGGATTGGGCAGATTATATACCTCGTTCTACC
TGTTGGACTTGTCACGTGGGGTTTGTATCAGGGTAGTGGGAAGGT
CACATGTTATTTCTCCATTTTTTTAGTTCCAAATATA

[0715] In some embodiments, the intronic domain that promotes trans-splicing primarily in the liver comprises or consists of sequences from the gene TOMM5. In some embodiments, the sequences from gene TOMM5 comprise or consist of:

(SEQ ID NO: 659)
GTAGCGGGGAGCAAGGAGGGTGCGCGTTGAAGGCGACGGGCATAT
GCGCGGTTTGAGGTCTGCGGGTCAGGGTCCGGGCACTGAAGTGCA
CGTGGTGGCCGGCGCGCGTGTTTAATCATCCTGGTTCTCCCAGCT
TGAAGAATGTTTGAGCTGCCGGGCGCGTTGGCTCACACCTGTAAT
CCCACCCAGCACTTTGTGAAGCCGAGGCGGGCGGATCATTTGGGG
TCAGGAGTTCGTGGTGGCGGGCGCCTGTAATCCCAGCTCCTCGGG
AGGCTAAGGTGGGAGGATTGCTTGAATCCAGGAGGCGGAGGTTGC
AGTGAGCCGAGATCGCGACACTGCACTCCAGCTTGAGTGACAGAG
CAAGACTCCATCTCAAAAAAAAGAATGTTTGAGCTGAAAGAGCTC
AAGTAATTATCCCTAGAGGAACTCCCTCGTTTTTGCAGACAGAGA
AACAGAGAAACAGAACCATAGTTCTAGAAGGAAGAAACAGCCTTC
TTGG

[0716] In some embodiments, the intronic domain that promotes trans-splicing primarily in the liver comprises or consists of sequences from the gene TOMM5. In some embodiments, the sequences from gene TOMM5 comprise or consist of:

(SEQ ID NO: 660)
AGGCTGGAGCGCAGTGGCGCGATCTCGGCTAACTGCAACATCCCC
CTCCTGGGTTCAAGCGATTTTCCTGCCTCAGCCTCCCGAGTAGCT
GGGATTGTAAGCACGCGCCACCGAGCCGGGCTGATTTTTGTATGA
CAGATGTTATTAAAGACAGCGTGGAGAAACCAGAGCCTGCGTTGC
TGAGCTTGCGGCCGCCCGCTTCACACCGCACTTCAGATCAGCTGG
GTCAGGACGTGGATTGTCCCGTGCAGGCATCCATCGTCGAGTGTG
GCAACGAGAGGGCGGGAACAGGAAGTGAGGATAGGCCGAGTTCCG
GGCGCGAGGCGGCCACCGTGGAGAGCAGAGCGCGGCGGCTGGAAG
CTGCTAAGTCAGAGCCGCGATGTTCCGGATTGAGGGCCTCGCGCC
GAAGCTGGACCCGGAGGAGATGAAACGGAAGATGCGCGAGGATGT
GATCTCCTCCATACGGAACTTTCTCATCTACGTGGCCCTCCTGCG
AGTC

[0717] In some embodiments, the intronic domain that promotes trans-splicing primarily in the liver comprises or consists of sequences from the gene CBWD5. In some embodiments, the sequences from gene CBWD5 comprise or consist of:

(SEQ ID NO: 661)
GTAACTAACCATCCCAGTCACAAAATGCCGTGAACTCTGGTGTCA
TGGGATTTTGCGGGCTGCCGGTGCCTCTTCTCCTGAGGCATTGGG
GCCTCATGATCAAGAGCAAATGTCTTTGAGGTAGGGGCTGGGTCA
CTTGCTTCTCGTATGGGTTACCTCTCATCTTGGGAGTTAATGATG
CCCGGTCCCCTCTGCGTTAGATTCCCATTTCTCAAGTGAGATGGA
AAGTTAGCCTTTGAAACAAGGCTTTGAAGCTAAGACACGCCCCCC
TAATTGTCTCTGTGACCTCTTACCAAGTTATCTTACCTTCCTGAC
GCTCATCTACCTCACCTGAAAATGGAAAAATACCTGTCACCTGTG
AAATAGGGCCGGAACAACCTACCTATTGCCATTAAAGGATGTCCC
GTCTGTAAAATGTCCGACACGTGGGGCTTTCGTCAGCAGATTCCC
CTTCCCCAGGAGCCAAAGTCCTCCAGCCAGTTGGCAGGAAGTGCT
CCTA

[0718] In some embodiments, the intronic domain that promotes trans-splicing primarily in the liver comprises or consists of sequences from the gene CBWD5. In some embodiments, the sequences from gene CBWD5 comprise or consist of:

(SEQ ID NO: 662)
CTGAGGTCCAAATAAATAATGAGGAAAAAGTAAATAAAAGTGATG
CATGAATACTAAAAATTTGGAATTACATATATAATATGTAATAAT
AAAAAAAGAAAAAATTGTCACTGGTTATCCTTCAGGTATAAAAAT
TACAATTAAAATTGTAATGTTATAACCTTCCATTCTTTCCCCTAT
GAATTAAAACTTTTTTTTTTAACGAGACTAAAAAATCAAGTTGAT
AAAATCTATGCCCTGTGGGAACTGGTTAGGTCAGGTTACCCACTC
CAGATTTCCAGCAGGCTAGCCTCAGCTCTACCTACAGCCAGTAGC
TTATTAAGGCTCTAGGCGCCAGTGACACCTTCAGACAGGTGGTTA
GTGCGCCCTAAGGGCTCTCCGCAGCGTCGCTCAGGTTCACAGAAC
ACGCCCAGGGGCGTGTCCAGCTGTCGTCGGGGAGAGCCCACCTCC
CCGGGGGGTGTGGCTAAGGGACGAGGCAGTTCTCGTCCAGAGCCC
AGGT

[0719] In some embodiments, the intronic domain that promotes trans-splicing primarily in the liver comprises or consists of sequences from the gene TJP2. In some embodiments, the sequences from gene TJP2 comprise or consist of:

(SEQ ID NO: 663)
AGAAAAGCAAGACAGACTGAGAAAGTGTGGCTTAGCCGCGGTATG
GAGGATGGATGGTAGCACAGATAGGCTGCAGGGCCCCTAATTTGA
GTTCCTGCACAAAAACGACCATAATATCAACATTGTACCAAAGCC
AAGTGATCTCAGGGAGAAAAATAAAAGATGCCTTCCCTGGCGAGC
ACATCAAGGTTTCAGTCGCTTGGCTGTGTCCTTGGGAATTTTCTT
GAGTCCCCACTCCCAGGAGCCACATCAGACCCCACTGACCGTCCA
ACACAAATTCCTCTAGATGGAAGGGATGGATGATGACCCCGAAGA
CCGCATGTCCTACTTAACCGCCATGGGCGCGGACTATCTGAGTTG
CGACAGCCGCCTCATCAGTGACTTTGAAGACACGGACGGTGAAGG
AGGCGCCTACACTGACAATGAGCTGGATGAGCCAGCCGAGGAGCC
GCTGGTGTCGTCCATCACCCGCTCCTCGGAGCCGGTGCAGCACGA
GGAG

[0720] In some embodiments, the intronic domain that promotes trans-splicing primarily in the liver comprises or consists of sequences from the gene TJP2. In some embodiments, the sequences from gene TJP2 comprise or consist of:

(SEQ ID NO: 664)
GCATAAGGAAACCCAGCCCAGAGCCACGAGCTCAGATGAGGAGGG
CTGCTAGCAGCGATCAACTTAGGGACAATAGCCCGCCCCCAGCAT
TCAAGCCAGAGCCGCCCAAGGTACGTGGCTGGGAAGCCCAGGATG
GGAAGGAAGAGGAAGCAGATGCCTCTGAAGCCTCCTGGACGGCCA
GGGAGGAGCATGCACACTGAGATGGTGTTTAATTACGGTTCTGAC
TCACTGTGTTCTCTATTAGAGCCTATCTTTTGGCCTGTTGGGTGA
ACTCCCAAATTAGGGAAGGGCAAAAAGGAAGGAAAGGCAATATTA
GGAGAGCATATGATTTTAGGACTGTTAGTGTTTATTTAATTTACT
CTTCTTGTTAAAAAAAGATTGTAAAGAAAAAGATTGAAAAATACT
GTACTGTATACCCAGAATCACCAATCGCAGAACGTGTTTTTCTTT
TGCTGTCCAGCTAAAGTTTTCTGCCCAGTCTGATTTAGATGCACC
AGAT

[0721] In some embodiments, the intronic domain that promotes trans-splicing primarily in the liver comprises or consists of sequences from the gene ALDOB. In some embodiments, the sequences from gene ALDOB comprise or consist of:

(SEQ ID NO: 665)
GTAAGGATATTGCCCACTGAGATGAATCATGCCAGTGTAAGCTAG
AAATGAAGGCAAGTAAAGAAGGAAGCAAGGAAAAACAAAACACAA
CTATTACACTGGTCTTAGAGCCACACGTACCTGGTTTTCAATACC
AGCTCCTCCATTTAACAACTGTGACCTTGGGCCAGTCACTGAAAT
ATTGTGAGCCTCAGTTCTCCTATCTCAAAATGGGGATTTCTCAAA
ATGTTGTGGGGATTAACTTAGACAATGTACATAAGGTGCTTACCA
CAGTACCTTGGACAAAGAAGATTAAACTCTGCACCCGGAAGTATT
ATTTTTAGAAAAAAATTAGCAGCAGTAGAGTGGAAAGTCCCCACA
CTTTGAGGTCAGACACACCTGGGTTTGAATCCTGGTTCTATCACA
TGCTACCTAGATAATTTTGCAAGGTACTTCTGCCCAAGTAGACAA
GCATTAACTCACAACATTGGGTTAGCTAAGCAGAATTTGAATCCC
AGCT

[0722] In some embodiments, the intronic domain that promotes trans-splicing primarily in the liver comprises or consists of sequences from the gene ALDOB. In some embodiments, the sequences from gene ALDOB comprise or consist of:

(SEQ ID NO: 666)
ACTTCTCAAAAGTGAAAACTAGTATCCATTGAATAAGAGTTTTTA
CCATTCCAAGCATTCATTTAATTCTCATAACCTCTGGTAGTAGAC
TCAATTATTACCCTTATTTAGAGATGAAGTGAGAAAACTGAACTA
CGAAGAGTAACATAACTTGCCCACACAACAAGGCAAGGTCAGAGC
CAGTTTAGGCTAATTCTCAAGCTCATGACTTTTGCCTTTGCTATG
TAGAGAGTAGAGGTTGTATCCTTAATTCTCTTTACCTCCTGTACT
AACACAACACCTGGTGCATGCAGGTGCTCAATAAATGTTAGGGTA
GACACTCTCACAGTGTACCTTCTAGGTAACTTCCCTTCTGCTATG
GACTGAACTGGGTCCCTCGCACTAATACACTTTACTAATTCAACT
CCTTGATCTGTAAAAGATGCAAACTGTTAGTTAGTTCAAGAGTTC
TGCTTGTGTTTTCCTGACATCTGACACCTGTTAATTATTTGTATC
CACA

[0723] In some embodiments, the intronic domain that promotes trans-splicing primarily in the liver comprises or consists of sequences from the gene PTGR1. In some embodiments, the sequences from gene PTGR1 comprise or consist of:

(SEQ ID NO: 667)
GTAAGTAGACCTCCTGCTTTCTTTCCTTCCCTTTTCTCCCTCCTC
TAACCCCCTTGCTTTCTTCCTGCCAAGTTTCTAGACGCCCCAGTG
GAGGAGGTTTGCTCTTAGACCTCCTCCCCTTACGTCGAAATGACC
GCTGGGTCTTGCACTCGGAGGATCTTGGGAGCCGACGTCCCGACG
CCTCCCGCCCCCGCAGTTCCTTGGAGAGCTTGGAGCCGCGCGCCG
GAGGGAATAGGAAAGCTTGGTTACAACCCGGGACACCCGGTAGCT
TCCTGCACCCGGGAGGGGGCTGGCCAGGGAACTTGCTGGACTGCA
CAACTGGGGGAGGGTAGAAGAAGAAAGATCGGGGTGGGGATTCGG
GAATGGGCAAGCGGGCGGCGGGCGGCGGGAGGCGAGGGTGGGAGC
AAAGGGCGAGCGGGCAAAGGCCGGGCGCCGCGCCAGGCCCCCTCC
TCGGGCGGGCGAGACTTTCCCGGGACCTGGCCCCTCTGCGGCCAG
ACCC

[0724] In some embodiments, the intronic domain that promotes trans-splicing primarily in the liver comprises or consists of sequences from the gene PTGR1. In some embodiments, the sequences from gene PTGR1 comprise or consist of:

(SEQ ID NO: 668)
GAAGCCAGGTCAAGGCCTGATGTTTGCTAGGGTGTGATGGGTGGG
GTGCCTCAGTGGCAAGAGTGCTCACTCCTGCCTGGGGGAGTCTGG
CAAGGGTTCACAGAGGTGACCTTGAATTGGCTGGTGGAAGGCGAG
TAGGTGTTCAGCAGGCGGACTGGGGACAGACAGGCAGGGTGTCTG
CACCGCAGCCCTGGGCGAAAGCTTGCACTGCGGGCAAGCGGCAGG
GCTGACGGGGAGCCCAGGGATCGGAGCCAGCACCGGGGGCTTATT
AGGGCTGCGGCCGCCCCAGGCCCTGCCTTTGGACCCTTCCGGCCT
GCTTGGCAGATGCCACGGTTGGTTCCCCCACGGGGCATATTTCCG
CCGGGCTCCAACTTAGGACCCCAGGCGGAGGTCCAGTGTCAGCTG
GACAAAGCTCTGTTAGGAATTTTCCTATCAGGAGTCCCTAACCCC
CTACACGCACACACACGGGCGCGCGGGCGCGCACGCACACACACG
CACA

[0725] In some embodiments, the intronic domain that promotes trans-splicing primarily in the liver comprises or consists of sequences from the gene ORM1. In some embodiments, the sequences from gene ORM1 comprise or consist of:

(SEQ ID NO: 669)
AGCCTCCTACCTCTGCTGGAAGCCCAGATCCCATTGTGTGCCAAC
CTAGTACCGGTGCCCATCACCAACGCCACCCTGGACCGGGTGAGT
GCCTGGGCTAGCCCTGTCCTGAGCACATGGGCAGCTGCCTCCCTT
CTCTGGGCTTCCCTTTCCCTGCTGGCTGTGGTCGGACCCCCACTC
CCGGCTCTGCCTTTTTCTCTTCTGGGTCCCCAGGGTGAAATTCTC
ACCAGCCCAGGGGACTCTGGAGGCACCCCCTGCCTCCAAACACAG
AAGCCTCACTGCAGAGTCCTTCACGGAGGACGGTTCTGTGCTGGG
CCTGGAGGGGCTGCCTGGGGGGCAATGACTGATCCTCAGGGTGAG
CTCCTGCATGCGCACTGCCCACCAGGGGCCTCATCTCCCCATCTG
CAAAATCAGGGAGAGATCTGCCTGAGTCTCCTCCCAGCTGACAGT
CAAAGATTCAGCATCAAGCCCCCATCACCAGCTCCCACCTTCTCC
CCAG

[0726] In some embodiments, the intronic domain that promotes trans-splicing primarily in the liver comprises or consists of sequences from the gene ORM1. In some embodiments, the sequences from gene ORM1 comprise or consist of:

(SEQ ID NO: 670)
TGAGAGCCCCCATTCCAATGCACCCCCATCTCAGCTTCTGGCCAG
AAGACCTGAGCAAGTCCCTCCTTCTTCCTGGCCTTGGCCTTCCCA
TGGGTGGAACCGGGAGGGCTGGCTTTAATCTCCACCAGACTCTTG
CCCCAGGACTGTGATGGGCGATTGGCCACTTCTCAATAATCTTCC
TGTTTTCCTTCCGCCTTCTGTTTGGCTTTAGACAGGACCAGTGCA
TCTATAACACCACCTACCTGAATGTCCAGCGGGAAAATGGGACCA
TCTCCAGATACGGTGAGGGCCAGCCCTCAGGCAGGAGGGTTCACT
GTGGGAACAGGGCAGGCCAGCATAAGGTGGGGGCTGGATGTAGAG
CCCTGGAGGCTTTGGGCACAGAGAAATAACCACTAACATTTTTGA
GCTCTAACGATGTGCTCAGAAACAACTCTAAGAGGACACTGAGAG
AATTAGAGGAGGAAAAAGAAGAACAGAGACCTCAAATAGTTTCCC
CAAG

[0727] In some embodiments, the intronic domain that promotes trans-splicing primarily in the liver comprises or consists of sequences from the gene ORM2. In some embodiments, the sequences from gene ORM2 comprise or consist of:

(SEQ ID NO: 671)
TAGTTTCCCCAAGGTCACACAGCTTATAATTAGAACTAGAATTGG
AACTCCAGGCTGGCTTCAGATCTGCCTCTCTCTCACGCCCTCTTT
AAGATCCTTTGCAAACCAATGGTAGAAGCCTGTATGTTGGAGAGG
TGGTACCTTCAACTATGTCCCCCATCACCGCAGAGGTGGCACATG
GCAGGGATCTGATGGAGCTGAACTGACATCATTTAGCATCCCGAG
CCTCCTCTCTGGGCCTCATTTTCCTCCTCTGTAAAACGGGGAGAA
AGGCCCTGACAGCCACAGTCTGTGTGAGGCTCCTGAGATCTCATG
TACAGAAAGTGCTTGGCGTGGAGCTGGGCACGCAGCAGGGGCTGG
GCACACGGTGGCCCAAAGGAGACCCGGGCCTTCACTGATGGGCTT
TGTGGCCCCGGACACACCTAGGACTCCTCACCTGTAAGACAGGCA
CCATTGTGCCATCCCATGTTCTCACCCAGAGGCTCTTTTTCTCTT
CCAG

[0728] In some embodiments, the intronic domain that promotes trans-splicing primarily in the liver comprises or consists of sequences from the gene ORM2. In some embodiments, the sequences from gene ORM2 comprise or consist of:

(SEQ ID NO: 672)
TAGGCATGCTTAGCAGCCCCAAACTCATGCCCCTCTCAGGCCTCA
CCCCCCATTCACCCACCCCTGGGCTGGCCCCTAGAACCCCAGCCC
TCCCTGGCCTCCCGCCGGGCCCCACCATGTCCCCAGTCAGTCTCC
TTGCTCCCCCTGCAGCTGACAAGCCAGAGACGACCAAGGAGCAAC
TGGGAGAGTTCTACGAAGCTCTCGACTGCTTGTGCATTCCCAGGT
CAGATGTCATGTACACCGACTGGAAAAAGGTAAACGCAAGGGATT
GGACAGTGCCCACCTTGTCCATGGCCCAACTTGGGCAGCCCCAGA
GGCCCAGAGCAGGAAAGCTGCCAGGCAAGGCTGCACAGCTAGGCA
GATCTTCTGCTTTTAGGCACCTGCCTCACTGTAGGGACAGCTGAG
CTCTACAGAGGCCCAGGGGTGGTGGATGAGAGCCCAGGAGGGAGA
AGTCCCTGTGAAACCAGGGAGGACCTGAAAGCTAACAGGAGGGAA
CAGC

[0729] In some embodiments, the intronic domain that promotes trans-splicing primarily in the liver comprises or consists of sequences from the gene C5. In some embodiments, the sequences from gene C5 comprise or consist of:

(SEQ ID NO: 673)
GTAAGTAAAACAAGCTATCTTCATTTTTCAATGCATCTTAGTTAT
GACGAATGAAGAGTTAAATTTAACAGATTCTGTTAACTTGAAAAT
AACTTGCTACTTCTGAGAACAGCAAGTGAATAGTATCATCTCTGA
ATGAGAAAGTCATGGAAGCATTTTGATTTGATGAGTAGCTAACAA
CATGACAGCTTTTATGGAATTGTTATTTATTAAAATTTACGTTAA
GTGATTATTCAAATTCCTCTTCAAAAAAGCACAAAAGAAACTCCA
GATAATAAACTTTCTTGACATTTTTTGCTTATTTTAACTTGGTGT
TTAGTTTTCTTTGTGTTTTTCATAGACTATACACAGTTAAACCAG
GGTTATTTAGGAGTCAATCTAATACTGTGATCTGAAAATCTGTTG
TTGTAGTGACTTCTACCATACATTTATGAGCTGACTTTTCACAAT
TTTTAGTGTCATTATTGAGATAATATGCATTTTAAGTAATGTTTT
AAAA

[0730] In some embodiments, the intronic domain that promotes trans-splicing primarily in the liver comprises or consists of sequences from the gene C5. In some embodiments, the sequences from gene C5 comprise or consist of:

(SEQ ID NO: 674)
CTAGGTTATGCTCAGACCATTTGCAGCACCAAGGACACTGCCATT
CAGGTCACCAAAAAAAGATCATCTTGTGAGCCCTGTCTAAACCAG
GCCCCTTCTAAAATCATTTCAGTGTGAAACTGAGTCCAGGTGGGT
CTTCATCAGTATTAGAGTGGACCTGCCAGATGTATGCTTGCAGAT
GATGCAACATCAAAGCAAATGCCCTGGGCAAGAGAAGAAAGGCCA
AAGCAATGGGCTTACTGGTTTCTAGCTTTGAGCCACTCTTCATAG
TGCCAAATTCCCATTTTAGGGTCCCTTTATTTGTATTAATAAAAA
TAAATTCCCTGGGTGTAAGTTCCTGTAAAGTACTCCCTATCTGTA
TTCCTGGGCATGAAAGGGTGTTTTAGTTCCAATTCTAGTTTTCCC
ACTTAGAGGTTCACCTTTCTGACATTAATAATTAACCAGATTATC
TGAATTCTTCAAGTTCAGTTTATTTAAAAGGAGACTATCCTCAAA
AGTG

[0731] In some embodiments, the intronic domain that promotes trans-splicing primarily in the liver comprises or consists of sequences from the gene DMD. In some embodiments, the sequences from gene DMD comprise or consist of:

(SEQ ID NO: 675)
CGTCTTCACCTCTTTTCAACCTGCTCCTCTTTTTTGCCTTAACTC
TGATGGCAGTCACACAACTGTGTGTTTTTCTTTTAATTCACTTTA
CACCTTGGTTTGGCTATTGCTTTCCATGGTTCATACTTAATTGGC
TGGATTTTATTTATTTTGACCTTTCAGTAAATTTTTTTGCGGCTG
AGTTTGCGTGTGTCTCCTTCACCACCTCATTTTTTGTTTTGCAGT
CCCGTTACTCTGATCAACTTCTGGCCAGTAGATTCTGCGTGAGTA
CTTTTTTTGCTGAAGGGTGCTGCTACCACCAACACATTCGCTCGC
TTGGTTCTCTTTTGTTCTGTTTATTTGTTTGTTTTCTTTTGTTTT
GTTTTGTTTTATGGACATATTAATTCCCCTTCCTTCATTTCAGTT
TTTTTTTTTCTTTTCTTGATGAGACTTTGAAAGTACCATCTACAC
AGATCAGGAGAATCAGAGTGGGTTTTTTGGTTCCTCCACCAGGTG
AAAT

[0732] In some embodiments, the intronic domain that promotes trans-splicing primarily in the liver comprises or consists of sequences from the gene DMD. In some embodiments, the sequences from gene DMD comprise or consist of:

(SEQ ID NO: 676)
AAAATACCATAAAGTGTGGTAAAATTTAATGTCACCTTTTTGACC
TTAAGACCTATAAACTACCATTTATTGAGTAGCCTAGTAAGCTTG
TATGTTTCTTTTATTTATCATAACAACGTGTTGAGGTGTTGTTGC
TCCCATTTTACTGATGATCAGAGCCTCTGAGAAGTAAATAACTCA
GCCAAATTAGTACATGCCAGGCCTGGTTTCAGAGCCCCATTTGTC
TGATTCCAAAGCCTTTGCTCACAACCACAACACTCTCCTTAATTA
CAAAACAAGTGTCATGGGGCAGAAGACTGGAGTGGTCATTAGTTT
TGAAATCATCCTGTCCTAAATCTGATCTCACCATGATCTCCCTTT
TAGACTACATCAGGAGAAGATGTTCGAGACTTTGCCAAGGTACTA
AAAAACAAATTTCGAACCAAAAGGTATTTTGCGAAGCATCCCCGA
ATGGGCTACCTGCCAGTGCAGACTGTCTTAGAGGGGGACAACATG
GAAA

[0733] In some embodiments, the intronic domain that promotes trans-splicing primarily in the liver comprises or consists of sequences from the gene GJB1. In some embodiments, the sequences from gene GJB1 comprise or consist of:

(SEQ ID NO: 677)
TTGCCCAGGCTGGTCTCAAACTCCTGGCTTCAAGTGATCCTCCCG
CCTTGGCCAAAGTGCTGGGATTACAGGCATGAGCCACCATGCCCG
GCCCTGTCATACAGTTTTAGAGGCTGGGAGCTAGAAGGGTTGACC
AGGATGGCAGCCTGTACAGGATCCCTCTCTGCAGCTTGCCCGCAC
TGTGGATCTGCCTAAGGCCAGGGCATGGGGGAAGCCTGAGGGATG
CTGAGGAGCACAGGTCCAGCTCAGTCTCCCAGAGAGACTAAACAT
GGGTGGGTGACAATGATGCCTCTCTTCCTCTGGGACAAGGCAGTG
ACTCCAGGCTATGTGATCTGTCTCTCCAAACCCATAGGGAGCTCA
GAGGATCAATCTTGTTTAATGATTGTATGTGGGAGGAGGTGGGGC
TGGTTAATGTTTGTCTGGTTCCTCTTGGGCTGTGGGCCATTTCTG
GCTCTGGCCCTGGGTTCGTTGTCCCTCCCCTGGGCTGGGCTGACA
GTAC

[0734] In some embodiments, the intronic domain that promotes trans-splicing primarily in the liver comprises or consists of sequences from the gene GJB1. In some embodiments, the sequences from gene GJB1 comprise or consist of:

(SEQ ID NO: 678)
TGAGGAGACTGGGGGCTGAGGGAGGTGGGCCAGGGAGGGCTGATG
TGGCACAGTGGGCCGGAAATAGGGGCCGGGTCTTGCCTTCTACTG
ACCTCCGCCTTCAGCCACTTAGGTCCCTTCCATGCTTCCCTCTGA
AGCTGGGGTGAGGCCCCTCCTGCCAGGTGCCAGACTTGCTTAGCC
TCTCTCTGCAGCCTCTTTCCAGGTTCAACATTGCTTTTCCTCTCA
CTTTTTTTCCTCTGGCCAAAGATTCCCCTTATTCCCATAGGGCCA
GATTCTCAGGAAGACTTGAGGGACCCCCTAGGTGCAAGGTGGCCA
AGTTTGTCTCTCTGAGACATTTCCTGCCACACAGGGTTAGGGTTT
AGTGGGAATGTTGGGCACTGCCAGGTGCTGTTTTCCTTCCTTGAT
TACAAGGCAAGCCAGGCATGCACCCAACACGGGGCTGCGAGTGGA
TGAATAAAGCGTGCTCAGCGGGCTGCAGAGGGCTAGCCAACAGGG
CCAA

[0735] In some embodiments, the intronic domain that promotes trans-splicing primarily in the liver comprises or consists of sequences from the gene TXLNGY. In some embodiments, the sequences from gene TXLNGY comprise or consist of:

(SEQ ID NO: 679)
AGAAGAAATTGTCCTGGATCATACAATAAGCTAGGATTTGCTCCA
GACCATTTTTTTCATTTTATCAGGCTACCTACAATTAAGGAATTT
CAGAAGATTTTGTGAACAAAAAATGTCCAGGAATTATGTGTGTAA
TAAATGAATTTGATATTTTGATCTCCTTATCCATCTTTTTCTTGA
TAAAATATCAGCTTTTTTTTTTCCAATGTAGGGCAGAAGCAAGAA
GTACAGATATTTTGATGGGGACAGCCCACGTCTGATAGGGTGGGA
CATGGGGCAGCAGTTAGAGGGTTGTGCTCTTTCTAGTGTGGGATA
GTTTGCAAGATGATATGTTGTAGCCACTTCTGCAGTGACGGGGAC
AGAAGGAGTCAGTGTTCTTAACTACAGTGGTAGCAGCAGAAAAGA
AGGGTAAGCAGGGTTCTAGAAATTTGTGTTATGTTTTCTCCCCAC
TGTATTTATTTCTTTGGTTAGTGGTGCAAGAAATTCTGTTTTCCT
GTAG

[0736] In some embodiments, the intronic domain that promotes trans-splicing primarily in the liver comprises or consists of sequences from the gene TXLNGY. In some embodiments, the sequences from gene TXLNGY comprise or consist of:

(SEQ ID NO: 680)
TAAGTTCTACTTCTTGGAAAAAAAAAAAAGATCGCCAAAATTGTA
ACCAAAGCCATTTAAAACAAACTCCTCACTTAACATAGTGCCAGG
GCATGCAATTTTGTTTCTTACTCTCTGGATGTGGGATATGCGAGT
GTGTGTGTGTGTGTGTGTGTGTGTGTATTAAGCTTTCTGTTTCTG
ATGAAATTTTCATATGAAATTTACTGGAGATAAGATTAAATTAGT
GGAAAAACAAGATAATTTTGCTTTCTATGTAGTGGTCACCAAGTT
AAAGAATTGTGCCAGTTATTAGGCAAGATAGGCTTTGAGATTTAG
GGACAGTTAAATTTTACACCAACTTAGTGAACATGAGACTTCTAC
CTAGTGTTACATTTCATTTTTAAATAAGCAATTTAAAAATTGGTA
AATGATTTGTTTACTTTGATTATATTCTGGTATAATTTTCTGACA
AAATTATCTGTGTCTTGGTCAGCATTGTTGCTAGAATATGTATTC
AGAT

[0737] In some embodiments, the intronic domain that promotes trans-splicing primarily in the liver comprises or consists of sequences from the gene MICU1. In some embodiments, the sequences from gene MICU1 comprise or consist of:

(SEQ ID NO: 681)
GTACTTTTTAAATTGATCTTTGAAGGCTTGGGCTCTTTAATGGTA
GTTTATAAATTATTAAAATTTATTCATTAAAATATTACTCTCACA
TTTCTGGTGGCTGGCAGTCTTAAAAATATAAATTAAACTGAGTTG
TAGTAATTAAATATAAATTAAGCTGAATTATAAACATCTTTTGGT
TTAAAATAACTAATATAACTAACGAAGACCACAGGGTGCTCTTTA
TTTTTACAGTACATTTTTTCTATACTTCCTTTGTTTGAAAAATGG
GGTGTAATTTTTGGTAGTCCCTCTTACCAAACCCTCAAATTAGGT
ATCTTATTATTAGTACAATGGATTATCTTCCTAAATACCTTTGTC
TTTAACTGCATTCTGAACCAAACCAACAAATACATTAAAAATTAT
GTCAGAATAACGTATAGACGATTCCATTATCAATGTTTCTAATCC
TGGGAATTCTATTTTAGAACAGCCATGGCACAAACATCATACAGA
GTAC

[0738] In some embodiments, the intronic domain that promotes trans-splicing primarily in the liver comprises or consists of sequences from the gene MICU1. In some embodiments, the sequences from gene MICU1 comprise or consist of:

(SEQ ID NO: 682)
AGGTTAAGAAATTTTGTTGTAATCACTCTTGTTAAGCATAAGAGA
TACTTAATTAATTGAGTCACTTAAATAGTCTTACTTGGAGGCCGG
GTCTGGTGGCTCATGCTTGTAATCCCAGCACTTTGAGAGGCAGAG
GCAGGAGGATCACTTGAGCAACCGGGAGTTCAAGACCAGCCTGAG
CAACATAGCAAGACCTCATCTCTATGAAAACATTTAAAAGCAGTA
GTAGTCCTAGCTACTCAGGAGACTGACGTGGGAAGATCGCTTGAT
CCCAGGAGTTGGAGGTTGTAGTGAGCTAAGATTGTGACACTACTC
CAGCCTGGGTGACAGAGTGAGACCCTGTCTCTAAAACAAAAACAA
AAAAGTCTTATTTGGGATATTATGTTCCTACTTGAACTGTAACAG
GACTGATGAGACAACAGTAACTTCAAGTTAAAAATTAATCTTTTT
TTCTTTTGAAATTTCTTACATAATAAATACAAATAAGCAGTTGCT
TGGT

[0739] In some embodiments, the intronic domain that promotes trans-splicing primarily in the liver comprises or consists of sequences from the gene VDAC2. In some embodiments, the sequences from gene VDAC2 comprise or consist of:

(SEQ ID NO: 683)
GGCGGCCAAGCCGGAGGCCCGCGCCGGACTCGGAGTCGGCCCTGG
CTTCCTAAGATGGCCGCGCTGCCCCGCGGCCCCTCGCCCCTCTCT
GCCCGGGATCTCCCTTTGGCCCTTTGACCCCAGCTTACCGCACTT
CTTGTCCCTCCCGCAGATTCCCCTCTTCCCGCGGCCTCGCCATGG
CGACCCACGGACAGACTTGCGCGCGTCGTAAGTAAAGCTGGGATC
TCTGCGGGATGGGGCGGCGGAGAGTCGAAGCCTGTCGACCAGAAA
CCCAGTTTGTTTCCCCCTATCTTTCCAAGAACTTGGAAATTCGGC
TGCTTTTGGTGGTCGCCCCACCGTCTGACCACCTCCTCTGCGGAG
GAGGGGCTGGGCTGCTGGATTTCAAATGGGGAACAAGGCCCGGGG
AGTTGGTCTGTGGCCGCATGGACTTTTCAGCCTTTGTACATGTCT
TTGACGTATAGAAGTAAAAAGTTGTTAATTGGGGATTCTGCCTTT
GGAG

[0740] In some embodiments, the intronic domain that promotes trans-splicing primarily in the liver comprises or consists of sequences from the gene VDAC2. In some embodiments, the sequences from gene VDAC2 comprise or consist of:

(SEQ ID NO: 684)
TAAGTTTGAAGCGCTATTTGATATTTAGTTGATGTAGACATTTGA
GTGAAACACACATGGCAGTATTTTTTCCAAGTTTCAATATTTAAA
TTCCCAGTATTAAATTCTCTTCCCACTCCAGGGTGTTGGTTTTCC
CCTCAGCGAAGATATTAAAGGACGTATCAGGGTAAAGGGCCTAGT
CTTAGGTTTCGGTTTTATCTAATTTAGTTAAATCAGCTCATCTCA
GTGAATTTTGGCAGATACATAAATATCCATACACACAAATACTTG
TTTGATTCTTTGTACTTGTCCAGTCCTAGGAAGTGAGGCTGTAGG
TAATAGACTGTTTTTCCGTTTTGAAACGAATTCCCCAAGTTTGTA
TAATCATGGTTATCTGTTTTAGAAATAATTCGTTGGTGGTATCTC
CTTTATGGGTCGTTATAGTTCTATTGTAGCTCCTGACCGCATAAA
AAACATTCCAACAAATGGGATTGCTTGAATTTTAATATCAGCAGT
GGGT

[0741] In some embodiments, the intronic domain that promotes trans-splicing primarily in the liver comprises or consists of sequences from the gene CYP2C8. In some embodiments, the sequences from gene CYP2C8 comprise or consist of:

(SEQ ID NO: 685)
GTAAGTCTGCCTTATGTTCCTCCAGCCAATTGCAAAGGGTAAGTT
ATTTGACTGCTATTTTTAGACAAAATATATTCCTGGAAGCACACT
ATTATAATAGATCATTGTAAAGCAAAATACTCCCTCTGAACTTCT
TTGATGTTTCTTTTGTCTTCCTATTTTTTTTTTTTTTGAGACGGA
GTCTCGCTCTATTGCCCAGGCTGGAGTGCAGTGGCACTATCTCCA
CTCACTGCAAGCTCTGCCTCCCAGGTTCACACCATTCTCCTGCCT
CAGCCTCCCCCGAGTAACTGGGACTACAGGTGCCCTCCACCATGC
CCGGCTAATTTTTTGTATGTTTTAGTAGAGACAGGGTTTCACCGT
GTTAGCCAGAATGGTCTCAGTCTCCTGACCTCATGATCTGCCTGC
CTTGGCCTCCCAAAGTGCTGGGATTACATGTGTGAGCCACCGTAC
CTGGCCTCTTTTGTCTTTCTAAGTCTGTCATTGTCAGAAATAGCG
GAGT

[0742] In some embodiments, the intronic domain that promotes trans-splicing primarily in the liver comprises or consists of sequences from the gene CYP2C8. In some embodiments, the sequences from gene CYP2C8 comprise or consist of:

(SEQ ID NO: 686)
TATACATTTATTAGCTAATAATTTGATATATGTATGGTAATTCAA
CATGTATGAGTTATATTCACTATTTCATGTTTAGGCAGCTGTATT
TTAAGTGAACTATACTAAATATTTGAAAGGCTTTTGTTATCAAGG
GCTAAGTCTCCTATTTTTTGATATAGCATTACAATGTACATTTTT
TATACACAAAATATAGAATACACTGATTTCCCTCAAGGTCATAAA
TTCCCAACTGGTCATTAATCTGAGAATATTGAATTTTGAGTATAT
TCTAACATAGAATCATTTACTTCAGTGTTTCTCCATCATCACAGC
ACATTGGAACAACCAGGGACTTTTAATTAAAAATACCTGGGCTCC
AATCCAATACAATTAAACCAGAATCTCCTAGATTGGCACTGGAAA
GAAGGAGTAGGACAAAAGAACATTTTATTTCTATCCATGGGCCAA
AGTCCACTCAGAAAAAAAGTATAAATTGGATCTAGGTGATTGTTT
ACTT

[0743] In some embodiments, the intronic domain that promotes trans-splicing primarily in the liver comprises or consists of sequences from the gene GPAM. In some embodiments, the sequences from gene GPAM comprise or consist of:

(SEQ ID NO: 687)
GTGAGTGAAGACCCTTCAGTGTTGCCTGGTCTCTTTTCTTGAGCG
TTTTCATGAAAACGTAACCCCCCGTGTTTTTCTGTTAGATAATGT
TTGACCCATTGTTGATACTTTATATTCCACTCCTGGATTTCAGTG
ACCACCAAACCAATATGTCATTTACTATCTTGGTTTGCTCTCTGG
GTCACTGCTCCACTGAATCTATCCTGCAGCTATGAGCCATGATAG
GACAGATTGCTCAATGTTCTCAGGCAGTCACATCCAAAGCTAGTG
AGCACGTATTGTGTGTGAGGCACTGGGTCAGTGGTTTGTAAATAA
TTAACACACCCACCTGTAGATGATGGAACCACAGATGGTAAGAGT
CAGAAGCAGCCTTAAAAATCATCTGCTCGGCCAGGTGCGGTGGCT
CACGCCTGTAATCTCAGCACTTTGGGAGGCTGAGGCGGGCAGATC
ACGAGGTCAGGAGATCGAGACCATCCTGGCTAACGTGGAGAAACC
CCGT

[0744] In some embodiments, the intronic domain that promotes trans-splicing primarily in the liver comprises or consists of sequences from the gene GPAM. In some embodiments, the sequences from gene GPAM comprise or consist of:

(SEQ ID NO: 688)
GCCTAAAACACATAGTGGTATCTGCTTTAATTTGGGTGATAGCCC
CTTGCTTGAGGGAATGTGGCTATAATTTTAGTTTTCAAACGAAAA
TGTAATCTCCTGTTATATCACTGTTTACAATGAGTAGTTACTGAA
TTACCGTTTGTATAGCATTACCCTTATTTTTCAGGAGAGGTAGAG
TGTCTTGCTATCCAGGAGCTGAAAATCTAACTGAGATGAGACATA
CACAGAGCAGCAAAGTGAGTGGAGGGCCTCATTTGTGATTAAGAG
AAAAGAGAGGAAGGAGAGAAGAGGGGGCTTATGTCTTTGGAGAAG
GTTTTTGATGCAGTTGGGATCATATGGAATCATAAGAATTTAGTC
TTATGGGATTTACTTAAATTTCTCCAAATACAGGCCATTATTTTT
GATGTATTAATAATCTCTTAAGGTTATTCAAGCCAGTTGAAGTTT
TTCTTGGAGACTTTGAGCTGGCAACTTCATTGTTGCTTTTCTTTT
CTTA

[0745] In some embodiments, the intronic domain that promotes trans-splicing primarily in the liver comprises or consists of sequences from the gene ACSL5. In some embodiments, the sequences from gene ACSL5 comprise or consist of:

(SEQ ID NO: 689)
GCTACCTATTAGCTACATAAAGTATCTTTCTCTCCACCTCTTATT
TCCTACAGGTGACCCCAAAGGAGCCATGATAACCCATCAAAATAT
TGTTTCAAATGCTGCTGCCTTTCTCAAATGTGTGGAGGTCAGTGG
TCAGTTGAAAAAGAGGCTCTCATTAAAATGTGAATCTGTCATAAG
ATTTTTATTTTTGAGGTTAGAGCAGGCAGACACACACACACACAT
ACACACACACACACACACACGTTAAAGGCTGGAGTGTGGACAAAC
ACCAGCGTGTTCTTTGTTTAGAGGACTGTACATTTTCAAGCGTTG
GTCTTTTAGGATCACTGCAAATTTCTACACTATATGCAGTTCAAG
GCATCTCAGATCTACACAGTGTACCGCCTATACAGCTGTCTGTGG
TAGTCCTGGGAGGAGGTAGTTTTAAAATCTCCATTGGAATTGAAA
GTTGGCATTAATCTCATGTTGCCTCCTCTTACTTCCCTGGCCTAC
ATAG

[0746] In some embodiments, the intronic domain that promotes trans-splicing primarily in the liver comprises or consists of sequences from the gene ACSL5. In some embodiments, the sequences from gene ACSL5 comprise or consist of:

(SEQ ID NO: 690)
TGAGTGTTCTGTGTTCCTAGCAGTATGTGGCAAGGGGGTCCTGAC
TTGCTATCACATGTTTATTCCAAAGGCAGCTACACAGTATTTACT
GTTCTTTCTCCGGTGTGAGAGGTGCAGGCAAGGAGTTGGCTCATG
GGAGCCCTAATCATGGCATGGCCCCTCATTTCCTGCAGAGTCTTC
CTCTGCTAAGTCTGCATGTGTCCAGGGAGGATAGTACTTGCTCCT
GCCTTCATGGGGGTGTGTGAGTCTAGTGACATCACAGCTAGGAGC
TTACTATCTATCTGCCCTTAATTCTGAGCTGACACAAGACATTGT
CTTCTTTTTAAATTTTATTTTGGTTAGAATTTTTGAAAAGATCTA
GGATTAGAGAAAAGGAAGTTCCCTACAGAGGATCAGGGAAGGAGC
ATTTGATCTACATAAGGTGTGAGATGTCCCCCGCGCCGGTTTTTG
CACACCTGAGTGTGTAAGGTGGTGCTGTCAGCATGGTGCATACCG
GAGG

[0747] In some embodiments, the intronic domain that promotes trans-splicing primarily in the liver comprises or consists of sequences from the gene HABP2. In some embodiments, the sequences from gene HABP2 comprise or consist of:

(SEQ ID NO: 691)
TGAGGTTTAAAACAAAACTTTTGAAGCCAACAAGCAACTGTGGGC
AACACTTCAAAGGGCCCAGAATCAATGTTTGTCAATAGCAGTTTT
GCATCCTTTAATTTATGTCTCATGAATATAAAGTGTGATGTTATT
AGGAGCCCATCCATGCCTTAATTCTGTTTGAGATTTGATGAACCA
GAAGTCTATTAACATTCTGTACAAATCAGCACTGGCAGAGGCCTG
TGGCACAGGCTTCACCTGATCTTTTATCCTGAGGCTGGGATGCTA
GTCACGCTGTCAGGCTTCCTGCTCGGAACACCCAGCAGCTGTCAT
GTGCACCGTGGAGCCAGGGGGCTATGTCAGCTACTTTCTTTGGAG
AGTTTCTCCCCAGAAGAGAAACCACTTCATGACTCAGCCCAGCCC
CAAAGTTGCCATTTGTTTAATCAAGATAGTTAGTTTGCAAAACAT
TAAACATTAAACAGTATTTGATGCCTAGTTAATAATTTGCATCCT
CTTC

[0748] In some embodiments, the intronic domain that promotes trans-splicing primarily in the liver comprises or consists of sequences from the gene HABP2. In some embodiments, the sequences from gene HABP2 comprise or consist of:

(SEQ ID NO: 692)
TAAGTGTTCTTTTCTAATATTTGTAGTTGAGAGACTCCGAAGTTT
ACTAGGAGGACCAAGCTAGGCTGGGAGTGATGAGAAACTTTAGAG
TGAAAGGCTGGAGTTGCCAAGTTGGAGATGTTCTAACTACAAGAA
CCAATGCAGGCCTGTGGCTTGGTTTCTTTTGAGCAGCCACTCCCA
TGGGAACAGGTGTCTGACTTGAGCCATCTTGGAGCGGAGCCTCCA
TGAATGCATTCCAGCAAAGGAGACTGGGGCAAGAAAATGTGCCCC
AGGGCATGGATTGTAATCTGTCATGGATCTCATAGACCCCTTTGA
GAAGCCATGGAAAGCTATAAACTCTCTCCCCAGGAAAATATACCT
ATCTATTGGTGCTGACACACACAGTTTTCCAGCGATTTGTGGCTG
ACACTAGGGTAAGAAGCAATGTGCTATGGCCTTAGAGGGGAAGCC
TGCTGACTGCAAAAGATCCTGGCAGTGGGTCTGCATAAATAGTTT
GGAT

[0749] In some embodiments, the intronic domain that promotes trans-splicing primarily in the liver comprises or consists of sequences from the gene IGF2. In some embodiments, the sequences from gene IGF2 comprise or consist of:

(SEQ ID NO: 693)
GTAGGATTTGAGCTGTGTTTCCCGCCCTGATCCTCTCTCCTCTGG
CGGCCGGAGCCTCCGTAGGCTCCAAGCCTGGCCCAGATTCGGCCC
GGCGCAGCCGGCCTTCCGCGCGTCCCGCACCTGGCGGGGGCTCCG
GGGCTCCGGCGCGGCACCGGGGGGCGCTCGGGATCTGGCTGAGGC
TCCAAGCGCCGCGTGGCCGGCTCCTCCTGCTGGGGCAGGTGGCGG
CTGCGCGCCCCGCCCGAGCCCAGGGGCCCCCTCAGCCGCAACAAC
CAGCAAGGACCCCCCGACTCAGCCCCAAGCCACCTGCATCTGCAC
TCAGACGGGGCGCACCCGCAGTGCAGCCTCCTGGTGGGGCGCTGG
GAGCCCGCCTGCCCCTGCCTGCCCGGAGACCCCAGCTCACGAGCA
CAGGCCGCCCGGGCACCCCAGAAACCCGGGATGGGGCCCCTGAAT
TCTCTAGAACGGGCATTCAGCATGGCCTTGGCGCTCTGCGGCTCC
CTGC

[0750] In some embodiments, the intronic domain that promotes trans-splicing primarily in the liver comprises or consists of sequences from the gene IGF2. In some embodiments, the sequences from gene IGF2 comprise or consist of:

(SEQ ID NO: 694)
CCGCATCTGCTGCTGTCCCGCCGGTGCTGGCGCTCGTCTCCGGCT
GCCGCCGGGGAGGCCGGCGTGGGGCGCGGGACACGGCTGCGGACT
TGCGGCTGGCGGCTGCGCTCGCTCCTGCTGGGCGCCCCGAAATCC
GCGCCACTTTCGTTTGCTCATTGCAAAGATCTCATTTGTGGGGAA
AGCGGCTGGAGGGTCCCAAAGTGGGGCGGGCAGGGGGCTGGGGCG
AGGGACGCGGAGGAGAGGCGCTCCCGCCGGGCGGTAAAGTGCCTC
TAGCCCGCGGGCCTAGGACTCCGCCGGGAGGCGCGCGCGGAGCGC
GGGCGAAGTGATTGATGGCGGAGCGAGGGGGGCGAGGGGGGCCAG
GGGGGCGCGAGATTCCGCCGGCGGCCCCTTCCCCTTGGCTAGGCT
TAGGCGGCGGGGGGCTGGCGGGGTGCGGGATTTTGTGCGTGGTTT
TTGACTTGGTAAAAATCACAGTGCTTTCTTACATCGTTCAAACTC
TCCA

[0751] In some embodiments, the intronic domain that promotes trans-splicing primarily in the liver comprises or consists of sequences from the gene PSMA1. In some embodiments, the sequences from gene PSMA1 comprise or consist of:

(SEQ ID NO: 695)
GTGAGAATATCTTTGCTTTTTGATAAAACACAGAATGCATAGATT
TCACATCTCACTATGTGAGCCCCCACAAAACAAAACCTAGAGGAG
CATGTGAGAAAAACGCATCTCTAGGCTAGAAAACAAAAAGAGAAA
AAAAGAAAAATGTCTGTGTAAGAAAGCAAAGGAAAGAAGATGCTC
AAATCCAGCAAATCATACCAGCCTTGTCATAGGCACAAAAAGAAA
GGGATTAACCTAAGTTACAAGGTGAATTATCATAAAATCAGATGA
ACCTTTCTGAAAAATAGTCATGGGACAAAGGAGGGATATATAACA
CTAGAGGCTTAACCCTTTCCTGCAGAGAAAAAAAATGTAACTGAA
AGAAATGCCACTCAAGGCTTGTGACATTCAAAGTGAAGACAAGAT
AAGGTCTTATGTAGTACATGACATAGGTGTAGACACTCACTAGAC
TGAAAGGAGTACATGTTTCCAAAGCAGCTTTAATTCACGTCTCTG
CTGA

[0752] In some embodiments, the intronic domain that promotes trans-splicing primarily in the liver comprises or consists of sequences from the gene PSMA1. In some embodiments, the sequences from gene PSMA1 comprise or consist of:

(SEQ ID NO: 696)
TGACCTAATTGTATTCATTTGTCAAGAGGCCGGTTCCATATCGGA
GACAGGCTGTATTCATAGATGATTTTAAGGACAGTTTAAGGCATA
GAGTTTTACTCTAAAAACTGAGAAACAAAAAATCCTTCATTGTAG
AATTTGTTTTGTTGCCCTAGCTCTACTATTTATACTTTTCCACTT
TAGCTATGCACAGAACATAGCTAATTTTCATCTCAATTTTTCAAT
TCTTTTGCTATATAATTGTTAACATTTATTGACCACTAACCTCAT
TTTAAGGACTGTGCTAAGTATTTTATATACTTTCCTGGGGAGGCA
CTTATTCCTCACTTTTGATATTTCCCTCCACGTGGGGAACATCCA
TTAGAGTAACTCTCCTGGCCTGTATCTACTTACCCCCAGGAGAGG
AGAAGAGAGTTTGGTGAGTTTGAGATGAGGAACAGGATGTCTGAT
GAAGATCTAATATAACTCATGTTCCTTTTACCTTCTCCATTGTCT
TTCA

[0753] In some embodiments, the intronic domain that promotes trans-splicing primarily in the liver comprises or consists of sequences from the gene DEPDC7. In some embodiments, the sequences from gene DEPDC7 comprise or consist of:

(SEQ ID NO: 697)
TGCCTTTATGGTATTCACCATTCATTGTTAATTCCTAGTCTTGCT
TTTGCTTTTGGAAATAATTTTGAATAAGTGCACTTTTTAACTCAA
ACTGTAACTTGAGTTTTGTTCCCTTTAATATAGTCATATTTGGTC
AATTAAAAGCAGTTTTTTTCTTTTGGCTAAAGTGAATGGGAAGAC
GGAAATAGCTTTAGAAGCTACCCAGCTCCTTCTAAAGCTTTTAGA
TTTCCAAAATAGAGAAGAATTTAGAAGACTACTGTATTTCATGGC
TGTTGCAGCAAATCCTTCTGAGTTTAAATTACAGAAAGAAGTAAG
TCTTTTGTTTAACTGTTAGTTGTATTTAATATCCTTAATACTTAC
AGGTTAAGTATTAGATTATTCCATCTTCAGCATCAAGTATGCTGA
AATGTATAATAGCTATTAATATTTAATATTCCCTTTTATATTAAA
CTTGTCTCTTAAATATATACTATTGGATATATTTGTTTTATTTTT
ATAG

[0754] In some embodiments, the intronic domain that promotes trans-splicing primarily in the liver comprises or consists of sequences from the gene DEPDC7. In some embodiments, the sequences from gene DEPDC7 comprise or consist of:

(SEQ ID NO: 698)
TAAAATTGTGAAAGTAGTTAAATTGAGCTTATGTAATAGATCACT
AGATTAAAATGCATTTGAATAATGTCCCATGTCCCTTCTTTTTCT
TAAGATTCCTGGAACTCTACATAAAATTGTAAGTGTTAAGCTTAT
GGCCATACAGAACGGAAGAGATCCAAATAGAGATGCAGGTAATCT
GAGAAATATTATTTTCATGATCTTCCAAAGACAAATTTCAGGTGT
TTTTTGAAAATGTTTTGCTATAAGTAGTTGGACTTTAATTTCAAC
CAAATTTAAAACATTCTCCTCAGAGTTATTCATACAAAGCAACTT
TACAAGTGTTAGAAAGTCAGCAGTGCTTACCATCTTCAGTGCATA
TTACAAAATGGGGAAGAAAAACATAAAGACAAGAATATTGCTTGA
TTTTTCTGCTTAAATATGAGGAATTGAGTCATTAACTGAACTTTT
TACTTTTAAACTTTAAGGATATATTTATTGCCAGAGAATTGATCA
ACGT

[0755] In some embodiments, the intronic domain that promotes trans-splicing primarily in the liver comprises or consists of sequences from the gene CTNND1. In some embodiments, the sequences from gene CTNND1 comprise or consist of:

(SEQ ID NO: 699)
TGAGAGAGGAGACCACAATAGAACACTGGATCGATCGGGGGATCT
AGGCGACATGGAGCCATTGAAGGGAACAACACCCTTGATGGTAAA
TTCTCTTTATATACTGCTATCTGTCTAAGGCTAGTTCTATTTTGA
AGCCTATGTGTTTTGTGAAACACAAAAAAAAGTACAGAGAAAGAT
CGCATCCTTTTCTGGTAGGGGTTTTCAGGAAAAAGTAAGAGTTCT
GACTCATGTTGGGATTTCTTGGGCCGTTATTCTGCAGTGGTCAAA
ATGGGGGAAGCATGTCTGTAAAAGTGTTACTGATATGACTAACAC
TAACTGATCTACTTTCAAACATTACCTTTTTCCTCTCCCTCCCTG
TTTATGAATGTTTTGCCCTTCTCTTACTATTATATCTTGTTTTGT
TTGAGTTTACAAATTTTCAGAGTTTCCCTAGCTCTGGCACACACT
CATGAGGTTCCTGTCTCTACTCATACTAACAAATTGCATGTGTTC
ACAG

[0756] In some embodiments, the intronic domain that promotes trans-splicing primarily in the liver comprises or consists of sequences from the gene CTNND1. In some embodiments, the sequences from gene CTNND1 comprise or consist of:

(SEQ ID NO: 700)
TATGTCCTTCAGTCACCCCCAAGATTGTTCTTGAGGAAGGAGGCT
CCTGAGTGCCAGCAACTTGTCAATCACGCTAATCTGATCAGGCCA
GAGACTAAGTAGTCTCAGCCACATGGGGCTCGAGGGGTTCTGCTT
TTGTGATTATTACCTCTTACGAGTCTGGGACATGCAGCTGGTGAT
CTGATTCTCCGTTATGTGCTGCTTTCCTTTCTCCAGATTTGCTCA
ACTTTTTTGGGGGGGGTCTCCTTAATCCCAACCCCATTAACATTC
TCTCTTTCTCTTTTTTCTCCACAGCAGAAGATTTAGCACCACTAT
CTCCGTTCCATCTGGGCTTATATGTACTTTTATTTTTTGGTGGTG
AAATTGACTGATGATTTTCCTTTTTCTTCGCTGGACTATTGTGCC
AACTGCCAGGCTGCCTCCTGCCCTTACAGCCCTAAGTGGCTGCCT
TCTTTCCATCAACTCCCAACTTCTTCCTGTGAAGTTTAATTGTCT
CAAC

[0757] In some embodiments, the intronic domain that promotes trans-splicing primarily in the liver comprises or consists of sequences from the gene MS4A6A. In some embodiments, the sequences from gene MS4A6A comprise or consist of:

(SEQ ID NO: 701)
GTGAGCAAGGTTGGAGGTGATTCTGCCCCTCTCCCCAGGCTTTCTGTGT
GAGTCCATTCCTCCTCTCAGATTTATTGTTAGAACTTAAGACAAGCCAA
TTACATTTCATAATGTCTGTGTCATTCAGACGCTGAGAACTAATCCAGC
CTTCTAAATGGTGCTTCTTAACTCCTTTCTTCAACAGGAGAGTTAATGT
GTGGAATTAAGTGCAGAATCCATGGCCCTCTGTGGTGACGGTGATGGTT
CAGGTTGTGTTTCTGGGTTCATTCTGGAAGCTCCCCCAAGGAAAGGAGG
AAGGAAGCTTGCAGGGTGGGGCTTTGCCATTGCCCTGACTGGCTCTGGT
TTCCTTGCCTGATACATTGAAGTCAGCTTCCAAAGAATGCCACCCAAGG
TTTTGAAGGGGCACAGTGCCTCTGTCCTCACAAAACCAGCCTGCATATG
AGTTTACTGAATTCATTTAGGTCCTGCTGAATCTTTCCCATTTGTTCCT
TCTCTGTTT

[0758] In some embodiments, the intronic domain that promotes trans-splicing primarily in the liver comprises or consists of sequences from the gene MS4A6A. In some embodiments, the sequences from gene MS4A6A comprise or consist of:

(SEQ ID NO: 702)
TTCTGGTTGTTACACATAGGGTGGGATTGTGCTGGCATAGGCCAGGGAG
TCTGCTAAGCATCCTACAGTGCACAGGATAGCCACCTACTGTAAAGAAT
TACCCAGTCCAAAGTGGCATTAGTAGCTTTTTTGAGAAACCTGTCCCAG
ATCATTAATCAGAACGTGTTATTGATATACCAGTCTTCTCCCTTGTAGT
TAGGTTGGTAGAATTCAGACTCTGGAAAAAACTGGGAATGTAAAAGGCT
GAATGAGTGTAAGCTGAAAGACAAGAGAAAGGAGAATTGTTTTAAGCTT
ACTAAAGCCAAAATGGAAAAAAAAAGAGGGGGGAGGATTGGGGGGTGAG
GAAGACAGTCAACAGACCGCTTTTAGGCCATCATTCCGAAGGGTTCTGT
GCTAGGAACCTTACACGTGTTGTCTCACATAATCCTTAAAACTCAGAAA
TGATTTTAAATTAAATAGCACAGAGAGGAAAACTGACTGGAGAGGGAGC
CTTTGCTTA

[0759] In some embodiments, the intronic domain that promotes trans-splicing primarily in the liver comprises or consists of sequences from the gene SLCO2B1. In some embodiments, the sequences from gene SLCO2B1 comprise or consist of:

(SEQ ID NO: 703)
AAAATGGGGCTAATGTACACCTCGCTCATAGGAGTGATGTGGGGTTGCA
GGGCAGAGTTACTGAGCCCGTAGTAAGCGCTCCATAAATGCCAGCCACT
GGTGTTGTCTGGCAGGAGCTGGCGTTACAGTGGTTGGGGATGCTGGGGA
AGTGTCTGACTGTCCCAGCTCCAGGTCTTGCCAACTGTAGGAGTAAGGG
GAGAATTTGATGGGACCAGTGGGTGGAGGAAGAGGAGTGATGTCTGTGA
CCAGAAACATACAGAGGTCAGCACAGGACCCTGATGGTCAGTGGGTGTG
TTGTCTTGTATATGGGACCAGGCTCTGCAGGTTGAAAAAGGATGGGGTA
CGTCCCTGAGCCCCCAGCCTAGATCATCAGATGGGAGAGAGGCTGGCTC
TGGGTGGTGGGAGAGAAGGGCATAATAAGAACCCTTCAACGTTGATGCA
TGGCCCTTGGGGGCTGGAACCCCTCCAACCTCATGTTGCCCATGTCTCT
GCTTGTTAG

[0760] In some embodiments, the intronic domain that promotes trans-splicing primarily in the liver comprises or consists of sequences from the gene SLCO2B1. In some embodiments, the sequences from gene SLCO2B1 comprise or consist of:

(SEQ ID NO: 704)
TAAAGATCTTGCTTGGGACCATTGGTGGTGGTGATGGGGTCCAGATGCC
CACTGTGTGCCAGGCCTGGGGCACAGGCATGAGCGGAATTCAATCCCTG
ATCTTAGGGCTCACAAGCTCATGGGGTGACAGACCTGGCCCAGCTCTCC
TAGAGCGGGGTATAGAGGCAGAGTCTAGACAGCCCGTCAGGAAGCCACC
TCGGATGCAGGGGTGGGGCGGGCTTGAGGGCCAGACAGCCAAGAGGCCC
CAGTAACCCAGAGCCCCTGAGGGGTTGTACATGCCAGGGAGGGGGCAGG
GTAGGACGGTGGGCCTTCATTGTCCCCTGAGCACCACCTCCCTCAGCCT
GGATGCCCAGCCCCGTGATCCACGGCAGCGCCATCGACACCACCTGTGT
GCACTGGGCCCTGAGCTGTGGGCGTCGAGCTGTCTGTCGCTACTACAAT
AATGACCTGCTCCGAAACCGGTGAGACCTGGTTTGATGGCTTGTGGGAA
GGGTGCTGG

[0761] In some embodiments, the intronic domain that promotes trans-splicing primarily in the liver comprises or consists of sequences from the gene PICALM. In some embodiments, the sequences from gene PICALM comprise or consist of:

(SEQ ID NO: 705)
GTAAGTAAATAAGGAGAGCTTCAATAGTTCCATGGTAGAGAGAGGCCTG
CTGGAAGGTTCAGAAAATAGGCCGTTTGGAACCTTCTCCTTTAAGCCAG
GAGGGCGGCTTTGGGAGGCGTCTTGAAATACATTCTTGACTCTGCTGGG
AAAGCTCGGGGAGCCAGAGGCCTAATACCCCCCACTTCAGGGGAAGCTG
TGAAGGCAGCTGCACCTCCTTTGTCAAGCTGTTGGTTTCAACCACAGAC
ACGAGGACACACTTGAGGTGGGGGGATAAGGGGAGAAGCCTGCCGCCCC
GCCCCACCCCCGCCAGCACACCGCCCTCGCCATTCCTCTCCCGCCCCGC
CCCGCCCGGCGTCTGTGACCCCGCGGGCCGAGCCTCAGGCGACCTGTTG
GCAGGGAGAGTCACGTGATGCGCCGGCTGTGCACTCCCCTCGGGCGGGC
CTCCTGTTGCGCCCGCCTGGCGAGTTCCATCACGTAACGCGCGGGCGCC
GCCCAGCTC

[0762] In some embodiments, the intronic domain that promotes trans-splicing primarily in the liver comprises or consists of sequences from the gene PICALM. In some embodiments, the sequences from gene PICALM comprise or consist of:

(SEQ ID NO: 706)
TATTTTGGATTTGGCTGGCAGATGGTGTACACAGACTTTCTGAGAATGT
TAGCATTTCATTTGAAACTAGCAAGATTACATGTGACTATCATGGTAAC
TTAGCACTCACATATTTTTCAACTTATCCCTAACCCTGGGTTGAATGTA
GAGGCTCTAATAACATATAAAAGGCTTTGTTAATGTATGGTCTGGGTCT
CATTGAATAGTATTTCAGGATGTAATACTTCTTTTAAAATGTCCACAGG
GCAGTGTCAACGTCTTTCCATGGAAATCTGGCTCACCCAATAAGAGAAA
AGAGGCCAAAGGTAAGAAAGACTAAACCAGGGGAGATGGCAGGCAGTGA
TGTCTGGACTGTTTGAATGGGACTTCTCCATTTACCGCCCCTCTCACTT
CCTTCTATGGTCTGGACCTTTAATCACCACAGCAGTCAGCCATGTAGGG
TCAAGCTAATCGCTGTTGACATCATCCTACTACTTCCCTTTTCAAATTC
CAGTGAAGC

[0763] In some embodiments, the intronic domain that promotes trans-splicing primarily in the liver comprises or consists of sequences from the gene SLCO1B3. In some embodiments, the sequences from gene SLCO1B3 comprise or consist of:

(SEQ ID NO: 707)
TTTAGTATGTGACTTGCAAATTTTTCTTGACAGCCAGACAAAATGTATT
GGGTAAAAGGAATTGCTGTATATAAGCCTTTATTAATGTGGTGTAAGGC
GATGAAGACAAAGTAGCATCCTGTAGTTCTATGATAAGGCCTCAATCTT
TTAGTGAGCCTGTACCTCTGGACTGTGAACTTCAAACTTGCTTCTCAGT
TTCTGTCTCCCACTCCTTAGGTAGAATGAGATGGCTTGAGGGGGCTGGA
GTTATGTATTTTCCTCCCTCCCAAAGGAAGGCTAGAGACAGCTGGGGTT
TAGTTTCTGTAGCTTCATATGTTTTTTTAATAATAGAAAAATATCTTAT
GCCCCCAATGAAAATAATAAATAGAATTGTTCTCTTAATATTTGTATGT
GTAACTTGTTTTTCTTTCTTTTAAGATATGCATACTGGGGAGAAAAAAA
TGTAAGATATTTTACACATTTAAAATAATAATCGACTCTCTATTTTCTC
TTTTCACAG

[0764] In some embodiments, the intronic domain that promotes trans-splicing primarily in the liver comprises or consists of sequences from the gene SLCO1B3. In some embodiments, the sequences from gene SLCO1B3 comprise or consist of:

(SEQ ID NO: 708)
ACCCATTGATAAGATGTGTCTTCATTGCATCTGTCTGTTCTCTGGGAGA
AGCAAAATCTGTGTTACTTCCTTGCATACTTGTTTGTTTATTCATTGTG
CACAAGAAGATATCTTCCACATCTTCACAAGCTGGATAAGAAATAGAGA
AAATGAGATCAAATATTTAAATATTGCATTTTCTGGTAGTGATGCAGGA
TATTTCTTGGCCTCTTCACTGGACTCACAATAGAGGTGCCCTGTTTATT
TGGTCTGCCATGCTCAACCCCTTGTGGGAGGGAGAGTGTGAGTGACGTA
GTGCAGGACCATGTGGGCTGTCCTGGTCATCGACACAGAAACAAGCTCT
GTGAGTTTCTCATGGCCAGACCAGGTGCGAGTGAGTGAATGCTGGACCT
GGGCAACCGCTCCAGGCACTGAAACGAGTGAGTTACATGCAGGGCTGGC
AGCCAGGCAAGGTGCAAGGGTGCTCAGGATCCTGAAGCCCCAGAGGGGT
TGTTATGGT

[0765] In some embodiments, the intronic domain that promotes trans-splicing primarily in the liver comprises or consists of sequences from the gene ANO6. In some embodiments, the sequences from gene ANO6 comprise or consist of:

(SEQ ID NO: 709)
AATTACTGATGCCTGAGGCCACCTCCAGAGATCTGGTTTAATTATTGGA
ATGCAGCCTCCACTGGGATTTCTAAAAGCTCCCAGAAGATGTTATTGTG
CACCAGGGGTAGTGAACCACAGACCTGAGATGTCAGGGTCCTGAGAGCT
CATCTCATCCAGTGGTTCTCAGCCCTGGCTGCAGATTAGCATCATCTGG
AGAGCTCATGAAAGAAGCACTGAGGTCCCACCACCTGAAACGACCTTTC
AGAGGAAGGAGCCATTCTTTTTAGAAGGTGCTCAGGTGATTTTGATGCA
CAGCAAGAGTTAAGGTTAACTGACATCTTAGCCATCCCATGTTATAGAT
AAGGAAAATGAGAGCAAAAATGGTCAAATGGCTTGTACGAGGTCAGGTC
CTTGTTGTTACAGAGGCAGGTCTGATGCCGCCTCCTGCTCTGTCTGCAG
CCTAACACCATCCCTTATATTGGCCTGTTGTATTTATTGATGCCTCCTC
ATCCTTCAG

[0766] In some embodiments, the intronic domain that promotes trans-splicing primarily in the liver comprises or consists of sequences from the gene ANO6. In some embodiments, the sequences from gene ANO6 comprise or consist of:

(SEQ ID NO: 710)
TAAGATCCCCTTCCTTTGTATTTGAACAGCATCCTTCCTTCTTTTTCCC
CTCCGACTGTCAGTTCCGGGAGAACAGGCCTGTCTTTCCTGTTATTTCT
GTAACAGTAGTGGGGTTTCAGATAATATTTGTTGAATTGAAGTTCTGTA
ACTTTTTATTCCTCAGTCCACATGGATTGCTGAAAATAATCCATTCCTA
TATGCATGCTTCAGAAAAGAACTTCAGAAAGCAAAAGTTATTTTTTTTT
TGAGACAGTCTCACTCCGTCACCCATGCTGGAGTGCAGTGGTGCAATCT
CAGCTCACTGCAACCTCTGCTTCCCAAGTAGCTGGAATTACAGGTGCAT
GCCACCACACCCAGCTAATTTTTGTATTTTTAGTAGAGACAGGGTTTTG
CTATGTTGACCTGGCTGGTCTTGAACTCCTGACCTCAAGTGATCCACCC
ACCTCGGCCTCCCAAAGTGTGGGGATTACAGGTGTGGGCCACCATGCCC
GGCTGCAAA

[0767] In some embodiments, the intronic domain that promotes trans-splicing primarily in the liver comprises or consists of sequences from the gene KRT8. In some embodiments, the sequences from gene KRT8 comprise or consist of:

(SEQ ID NO: 711)
GTGGGTGTGGGTACCTCTGACCGGACCTGCTTCCCTATCCCTGGGACCT
GGGGTGGGGACGGTGGGAGCCCCCTGAAGCCCCTTGGGACTTGGGGTCC
TGTTGTTCTGGGCCAAGAAGGGCTAGGAGTTGGTCCTGACACCCCATTT
GTCTGGGTACAGGCTGGAGTCTGGGATGCAGAACATGAGTATTCATACG
AAGACCACCAGCGGCTATGCAGGTGGGTGTCCCAGGGCCCTGGGATGAG
GGCGGGAGGCAGGGCCCAGGGAGGCCTCAGCTCCAGGGAGGGGGCTGTG
CTCAGTCGCTCACAGTGACCTCAGCCTGAGCACTCATGTTCTTGGGAGA
ATCCTAGGGTGGGGAGGCACATATTCAGGACCCCAGTAATAACTTTATT
ACTTAGTAACTTTACTATTAGAAAGCACCCAAATAAACCATAGCTGTGT
GCCAGGCACTGTGCTAAGTATCCTACAGGTTTTATGTGATTTATTTTAT
TTATTAATT

[0768] In some embodiments, the intronic domain that promotes trans-splicing primarily in the liver comprises or consists of sequences from the gene KRT8. In some embodiments, the sequences from gene KRT8 comprise or consist of:

(SEQ ID NO: 712)
AAGGGTGTGGAGGGGAAGCACCTGGAAACTGCTCATGTCTCCCTG
ATCTGCTTCCTTAGTCTCGTTTATTTATTTATTTATTTTTGAGAC
AGAGTCTTGCTCTGTCGCCCAGGCTGGAGTGCAGTGGCGTGATCT
CGGCTCACTGCAAGCTCCGCCTCCTGGGTTCACACTATTCTCCTG
ACTCAGCCTCCTGAGTAGCTGGGACTACAGGCGCCCGCCACCAGG
CTGGCTAATTTTTTTTGTATTTTTACTAGAGACGGGGTTTCACTG
TGTTAGCCAGGATGGCCTCGATCTCCTGACCTTGTGATCTGCCCG
CCTCGGCCTCCCAAAGTGCTGGGATTACAGGCATGAGCCACTGTG
CCCGGCCCTTAGTCTCATTTAATTTGAGCTGGGGGGAGTCAGCCT
AGGTGGTGGTGGGGAGGACCCTGAGGGAGGGTGGGAGCACGGGAG
AAGAGAAGGCATACCCAACCTGACCTACTTACCTGTCCCCTACCC
CACA

[0769] In some embodiments, the intronic domain that promotes trans-splicing primarily in the liver comprises or consists of sequences from the gene CSAD. In some embodiments, the sequences from gene CSAD comprise or consist of:

(SEQ ID NO: 713)
GTGCATACAGTCCCCTTCTTCCCAAATCCCGCCCTTCAAACCATT
GGTCCAGAGAATCATCATGGACTAGGGAGTTTAACATGGCTGGGG
TAGGAGGCTGAGGGGAGGGGGACTGGAGAGAGGATTGATTGGAGC
TGGGAGGTCAGACATGGCAGTTCTTCCTGATGCTGGGGTGAGGGT
GAGACCAAAGCCCCTTTGCTGGGGACCTGGAAAAGGAGGAAGGGC
TCTGGTTGGGCAGCTGGAGGAGGAGCCACTGACCTGCCTTTGCTC
CACCCCATCCAGGGCTGACTCTGTGGCCTGGAATCCCCACAAGCT
CCTCGCAGCAGGCCTGCAATGCTCTGCACTTCTTCTCCAGGATAC
CTCGGTGGGTCTGCCCCTGCCCCTGCACCAGCCCCACCTCTCTCT
GGAGCTCTGCCTTCTCTATCCCACCTTAGATAAAGTTCAGGCCTT
TCTCTATTCTCTTTACCATCCCTTCTGAAGCTGCATCTCAGCTAC
CACC

[0770] In some embodiments, the intronic domain that promotes trans-splicing primarily in the liver comprises or consists of sequences from the gene CSAD. In some embodiments, the sequences from gene CSAD comprise or consist of:

(SEQ ID NO: 714)
CACTATGCCTGACTCAATTTTTTTTCAATAGCATTGGATCTTCCA
GTAAAACATTCAAGTTCTTTGAGAGTATGAGCTTTGGAAATGAAA
ACCTAGGTTCGAAGTCCATCTCTGCAGCTTCTGCTTGGATCTTTG
AATCTCAGTGTCCCTGGCTGCACATTAAAAAGGACAGTAACACAT
TGTTGTGAGGTTGAAATGGGCCATTTTAGGCATGCAAAGAGCTTA
GAGCTGGGCCCAGCATCAGGCTCTGAGTAGCTTTTGAGATGACTT
TACATCTTTCTCCCTCTACATTTTGGCAACAGGGTGCTGTGCCGT
TCCTGGTCAGTGCCACCTCTGGCACCACTGTGCTAGGGGCCTTTG
ACCCCCTGGAGGCAATTGCTGATGTGTGCCAGCGTCATGGGCTAT
GGCTGCATGTGGATGTGAGTGGGACTTCGGCTTGGGGGTGCGGTG
GGGTGGGCTGAGCCAAGGCCAAGGCCCACGTTGTTCCTCCTGCTC
CACA

[0771] In some embodiments, the intronic domain that promotes trans-splicing primarily in the liver comprises or consists of sequences from the gene RDH16. In some embodiments, the sequences from gene RDH16 comprise or consist of:

(SEQ ID NO: 715)
GTAACCACCCAGGTTTGTCAAGTCTGTCTGTGTCTTCCCTCTGTG
TGAAGGGACCACCTCCTGTCTGCTCCCTGGGAAGATTCCTACAGT
GTCTTTCCAGGTTGAAGTAACAGTAGCTTTCTAATATTTCTCACT
TAACAGGCTGCCTGAACCCCATCTCTTTTCAATCCTTAACCTCTC
CCGACATTGGAGGTGTCTAGTCTTGGGGAGAGTTTGCCCTGATGA
GATTTTCTCTCCAGAATTCCTCTCTATCCTCTCCCTCCTGTCTAA
GCAGAAGTCATGTGTTGTTTGATGCTAAGAGCCTGGGTTAGAGAT
CTGGAGACTTGCTGGAGCATCGTTGAGAAGGGAGCACAGGGCTGC
AAGTGTGCACGGAGGCTGTGCCTGTGCTGGAGCCAGGCTTATGTT
CCCAGCACTTTACCTTGTTTTTGCTAGGGCCCATCAGCGTCCACT
GAGAGCTACGATCATCTCCATCTTCAGAGGAGAGTATCAGCTTAA
GGAC

[0772] In some embodiments, the intronic domain that promotes trans-splicing primarily in the liver comprises or consists of sequences from the gene RDH16. In some embodiments, the sequences from gene RDH16 comprise or consist of:

(SEQ ID NO: 716)
TTCTCATCCTAGACAGCCTGACCGTGCCCTAGTTTTCAGAGGAGT
GATTGATTCTGGGGTGCGGAGCAGGATGAGGAAACTCAGGCTCAG
AGAGGGATTTCCACCTAATGTGCCTGGAAACCATGGGTAGCTACC
CAATAAGGCCTTTCTATGTTCAGAAGGTCATGGACCAGGAGTGTT
GGTATCGGAGCTTTGTAGAGACAGTTTTGACCCCTGTACTTAGAG
CAGAGGGGTGTGTTTGCCATGGAGAGTGTGTGTGGGCAGCTGTGT
GTAAGCCTGTGTGAGTTCTGTGTATGTTCCTGTGTGAATATATGT
GTGTGCTCCTTCATGGACACAGCATGCATGTAGTGGGCATAGCAA
GGCAGAGAGAAATCAGGAGACTAGGGGCACATTGCCCAGTAGGAA
GATAGTATCTTCCTACTGGGCAGGACTTGAGGTGTGCAAAGGTGT
GCATGAGTACTGCAAAAGCAGTTCAAAGAGCAGAGAGGTGGGGCC
AGAA

[0773] In some embodiments, the intronic domain that promotes trans-splicing primarily in the liver comprises or consists of sequences from the gene MON2. In some embodiments, the sequences from gene MON2 comprise or consist of:

(SEQ ID NO: 717)
AAGCAGTCTACCTTACTTTTTTTTTTTTACTATATTGTTCTGAAG
TCAGGTTATTGCAAGAATAATCCATATTTCATATATTTTTAATGT
AGAAGATAATTGACTTATTTGGGGACAGGTGGAAAAGGGCTTTAT
CATCTATTCGTACTGATTTACTTTGCAGATACAAACTGTATAAAT
AACTTTGAATCATTTTTACCATTCTTTCTCATTTGTTTGCCCTTT
CTGTTGTTCATTCCTGTCCAGTCCATTCTTTACATGATAGCCGGA
AATGATTTTTCCATAGTAGGGCTTTGATCATTTATTTCCTCATCC
TCCCAAAGCAAAAAAATATTTTTCATTTACCGTTTCCTACCAAAT
TGCAAAGAATACTCCAGTCTGACTCCATTCTAGTCACACTTTATT
TCCCACAATAGATTTCATTTCCCCTACTCTGCACTAAACTAAAAT
TCTCAATCTTCCCAAATTTTTTCAACCTTTTGTTTATTTCATTAT
CCAG

[0774] In some embodiments, the intronic domain that promotes trans-splicing primarily in the liver comprises or consists of sequences from the gene MON2. In some embodiments, the sequences from gene MON2 comprise or consist of:

(SEQ ID NO: 718)
TAAATAATTTTTCTTTTCATTGAATGCAAAGCTTTTTTATGTGTA
CTTGTCTCGAAGCACTCTATTTGTATTACAATTATGCATGTACAT
GACTCATCTCCCTTTACATTGTTAAGATTTTTGAGGGGCTTTTCA
GACCATGTTTTGTTCTATTTTGAATCCTCTACAACATTGCTTTTC
AAAGTATGGTTTGTTGGACCAGCCATTGATTGGCTTCAACAGTTT
TGTTACTGGTCTGGGACAAGATAGTGAGCTGGCATCAGAATATAA
ATCAGATGTGTCACTAAACACACTGCTTGGTTCAGCTGACTTTTT
TTTATACAAGAAGACATTGGTAAAGAAGAAAACTGTGTGTTGGTT
TACATTCTGGCACAAGCTTCTTATTTTGTAGCAGATTGGCACCTT
AAGGAGCATTACTTTTAATATCCAAGAAAAAAGTAGATTCCTAGT
AAATTACTAATGAATGAGTTGTAGGATATTTGTTCCTGTCAACTA
TTAT

[0775] In some embodiments, the intronic domain that promotes trans-splicing primarily in the liver comprises or consists of sequences from the gene BTG1. In some embodiments, the sequences from gene BTG1 comprise or consist of:

(SEQ ID NO: 719)
CTTCTGACTGTTATTTATGAGCCTTTTCATGGTATTTATCATTTT
AGTATTGAAGATGCAGTGTTCTTTTGGGAATTACGTATGCTTAGA
AGAGAGTACTGATGCTCAAAGGTGAAATGATTTGAATCTAGAGTT
GGATAAAAAGGGAAAGGATGGGGAAAATGAAAACTGGGAAGCTAA
ACTGAGAAGGAATTGCAAGGTTTGGTGATAAAAATTCATTTGCTA
TGGTCATAGTTGTGTATCGAGAGGTTTGCACAGCACAGTCTCTTG
GCAGAGTTTAGGAATCTCTACTCTGGGGATTCTGCAGTTCATGAA
TCGTCAGGGAGACTCTGCATTCAATTTGTTTCTGTGAACATGCAG
GTGAAAGTGGTAGTACAGGTGGAACTTCATGGGAACTGGTTTTGG
GGGAGGTGTGGATGGAAAGCACAAATGTCTCAGTATTTTCTAAAG
GGAGACTATTTTTAAAGGTGTCTTGTTACAAACCACTTGATTATA
GCCT

[0776] In some embodiments, the intronic domain that promotes trans-splicing primarily in the liver comprises or consists of sequences from the gene BTG1. In some embodiments, the sequences from gene BTG1 comprise or consist of:

(SEQ ID NO: 720)
CACACCATTCTCGAGAGTTAGAATTCGTAGACCCGCAACACATGG
ACTACCCTTGCCAATTGTTATGGTTTTATTTTTAAACCTATTCTG
TGAAAAAGCTCCTCGGTATTTCAAACTTGAATTACAATAAAAACA
CCAGGTAGGGTTGTTTTTAAATGGGTCTCACCCCAGTGCTGACTA
CTGTTGTTTACCAACTACATTTCATCTGGTAACTCCATTGAAACT
AAGTACCTCAACCATTTTTTTTTTTTATCATAAAGCCTTTTTTCA
AATGGAAAGTTGTTTTTGAAGATCTTGACATCAGACTTTTTCAAT
CTTTGAAAATGATGGAAACAGTTAATAAAAATGTTTATTTTAGAA
TTCAGGTGATGTCTGGCTTGTGAGGAGCTGTTTATAAGTTTGTCT
TTGAAAAAGGCTTGCACACATCACTCTGAGACCAGCTGTTTCCTG
TGACTTTAACCTTACCTTCCCCAGACAATTGAGCTGAACCTGTAT
CTGC

[0777] In some embodiments, the intronic domain that promotes trans-splicing primarily in the liver comprises or consists of sequences from the gene HAL. In some embodiments, the sequences from gene HAL comprise or consist of:

(SEQ ID NO: 721)
TTATGGTGTCGCTTTATTCTTAGGTATTTATAGCAAAGTTAAGCG
CCTCTAACAGCAGTTAATCAAGCTTCTGAAGGATTCAGTTGACAG
ATGTCAACCGTTTTAAGAACAATATGCTTGACTCAGTACACTCTT
TTTCCCATTGGCTAGCAACAAAAGAGTTGGAGGTATCAGGATTTC
CTCCCCAGCCCCGCAGGCTCACCTGGTCTTTGTCACAAGTTGTCT
CAGGGCAGCTGGAGGAGGCAAACCCTAAAGAACAAGGGCTTTTCA
AGTCCCTGTTGTGCCACGTTCGCTAATGTCCTGTTGGCTAAAGCG
AGTCACGTTCCAGGCCCAGAGTCAATTTGGGAGGGTAACACTCAA
GGGCATGGGCATGTGATTTGACGTGATCCATGGGCCTGTATCTGA
CAATCTACCACATGCATAAAATCCCATCACAGGCTGGGTGCAGTG
GCTCATGCCTGTAATCCCAGCACTTTGGGAGGCCAAGGTGAGTGG
ATCA

[0778] In some embodiments, the intronic domain that promotes trans-splicing primarily in the liver comprises or consists of sequences from the gene HAL. In some embodiments, the sequences from gene HAL comprise or consist of:

(SEQ ID NO: 722)
AGCTACTCAGGAGGCTGAGGCACAAGAATTGCTTGAACCTGGAAG
GTGGAGGTTGCAGTGAGCTGAGATCATGCTACTGCACTCCAGCCT
GGGCGACAGAGTGAGACTCTGTCTCACAAAAAAAGAAAAAAAACA
AAAAAACAAGAAAAAAACCACATAGGTACTGTTAAGACCCTGGAG
CAACTATCCTTCACTCTATCCACACTGAATTCTCTGGGTTTTGTT
ATTTGCTTGCTTGTTTTGCTTAGGAAAAGTATGCAGCTTAAAATC
TTTATGATGACTTTAGAAAGTTTTGGACTTTGTATATTTACAGTC
TTTAATGCAACCAAAGACTAATTGACACAGGTCATGTGTCAAATG
GCTTAAAATAAAAGCAAGCAAACAGCAGCTGTGTCTGGTCATGTA
TAGAGTATGTTTTGACTTCGGATGAAGTTGATGTTTAATAGCATG
TGGAAACAATGTCGTCAATATTTCAACTTTGTTTTGTCCTTGCTT
TTCA

[0779] In some embodiments, the intronic domain that promotes trans-splicing primarily in the liver comprises or consists of sequences from the gene NR1H4. In some embodiments, the sequences from gene NR1H4 comprise or consist of:

(SEQ ID NO: 723)
ATTTGGGTGTCGAATGATGCCATGCTCATGATTTGTAGAGCATAA
TAACAATGTTAGCCTTAGGCCATTTTTATACATTATCTTGAGGCA
GAAGCTAGTTGTTACTTTGCTTTACCATAAAAATTATGACTTGTG
ACTAAAAAACTATTCAGCAGAACCTTCTAAAGTTATGTATGGATA
TGTCCTATGACCCAGTGATTTCACTTCTGAGAATATACTCAACAG
AAAGGATGCTCACGTCCACCCTACAGGTTATCTTTAGGGGTTTTG
ATTGGAAGGGGAATTGGGAGGCTTCTGGGAAGCATTACATGTGTT
GTATCTTGATCTCGTTATAATTACGTGTGTGTGCATAAAAATTCA
TCAGGTTGAACACTTAATTTTCACATTTTGTGTACAACATTTAAC
TTACACTTCAAAATAGTTAACGTTGCTATAATTATGCTGAATTAA
TGCTTTTCCACTTTTTAATTTTGTCATTTTATTTTAAACTTCAAA
ACAG

[0780] In some embodiments, the intronic domain that promotes trans-splicing primarily in the liver comprises or consists of sequences from the gene NR1H4. In some embodiments, the sequences from gene NR1H4 comprise or consist of:

(SEQ ID NO: 724)
TTTCTTTGGGAACAAAATTTGATAAATATACAAACTCATTTCTTT
AAATGTTGAAAGACATCCTATTGAATCTGAGGGGGTAATTTACAG
AAAGATACTGTCTCTCGCACTTTTGTCATCTCTGGAAAAGTCCTG
GTGAATAGTCATTCATTTGTAATAGCCCTCTGATCATTTCCTTTT
CTTTGAAGTTCAAAGAGAATAGCAAACAGAAAAGTTAACAATTTT
CACATAAAATATTCCCTCAAGCAATCCTTTCCCCCATAGTTAGTC
TTGAGGCAGGATTCACAAATTCAGAGTATGCAGCTAACTGCAGTG
ATGGGACCTTCGCTTTCCTCTCTTAAAAGTGAGGAAATGATTGGC
TTCATTGTATCCAATCATCTTTCTGTTTTGTTTTGCTTTTGAAAA
CATTCCTACAGCTGGGAGCACAGCTGCTGTATACTTCCCCCAAAG
CAGGAATTAGTTCATTTCCTTCCTTCATTGTTACACTGTTGCATT
CTTC

[0781] In some embodiments, the intronic domain that promotes trans-splicing primarily in the liver comprises or consists of sequences from the gene IGF1. In some embodiments, the sequences from gene IGF1 comprise or consist of:

(SEQ ID NO: 725)
ACCTTTTAGAGAATCTCGCTAAGAAACATGGAGAAAACGGAAAAG
AAAAATGTAATGCCCTAGAAAGCGCAAAGAAAGACAGTGGCAAAA
ATGAAAAAAAAAAATAAAAATTATAAAAGAGGCAAAAAAAGACAC
ACTATTCTCTGCCTCTAAAACACAATTAAATAAAAGAATTTAAAT
AAAAATTAAGGCTTCTATATGCATTTTTAAATTTTGTATGAATCT
GTTATGGAAGAATTGCCTATGTCAATATATGTTCAGAGTTAAATA
TTAGCCCCAAATGCTCAGCAAGACTGAATTGTGTCATAGAAGTTC
CCAGATTCCCTTTTCCCGCAATGTCATTGGAGGCTGCATTTCTTA
GTCAAGTCCAGGGTTTAGGCCAAAGGGCATCCGGTATTGCCTAAA
ACCCTGTGAGGTCTGTGAGGTAACTTTTGAGAAGAGGTCACTGCA
CTCTTCATCTTTTTTGCACTTTGGAATCAGATATAAAAGATGTAT
AAGT

[0782] In some embodiments, the intronic domain that promotes trans-splicing primarily in the liver comprises or consists of sequences from the gene IGF1. In some embodiments, the sequences from gene IGF1 comprise or consist of:

(SEQ ID NO: 726)
TGGTCTTAAACCTCAGCTGAGGCTGGAAGAGGACCATGGTGGCTT
ATTGGAGATGTGACCCCAGGGAGCCCCTCTGAAGGATGGAAGGGG
ACTGGGCAAGACCCAACACACACAGAACACAGTAGCCACTGGCCA
GGCAGGAAGCAAGGATCTCAGAAAAGACTTTTAGGTGAATGTGGC
AGGAAAGCGTGCTTGCTGGGGCAAAGGCAGATTCATTCTTTCTCT
TCCCAGGTGACCCAGCGCCTCTTGGTTTCTAACTGGGGAGGGGGT
AGGTGTCAAGAGATGAGTCCCAAAGTTCTGGAATGGTGGGTCTTG
TGACTGAGGTCTAGACCCCTCTCCAGCATGAGTGCTGTCTCCTGC
ATCATATGGAGCCTGGGCATTCTGAGCTCATTCAAAGGGACACCA
TGGGAACCACTTGTTCTCAATGCAATTATTTTTGTGATGTTTACA
GTATCAGCCCCCATCTACCAACAAGAACACGAAGTCTCAGAGAAG
GAAA

[0783] In some embodiments, the intronic domain that promotes trans-splicing primarily in the liver comprises or consists of sequences from the gene HPD. In some embodiments, the sequences from gene HPD comprise or consist of:

(SEQ ID NO: 727)
TACTGTGTCTGTGTTTGTGTTGCGCATAAGGCAGTAGTGCCTTAT
GGCAGCCAGGGGGAGGCCAGGGCGGCCGCCAGCGCCGCGGGACCG
AGGAGCTGCGGGTGCCAGCGCTTTGCCAGCGGGACCACGCGGAGA
GGGGAATTCTGGAACCAGGGAAGGAAGGGGACTTGCTCTGGAGGG
AAAGACGGATGACACTGCTTTTGTAGAGAGATAAACGCGATTCAG
ACAATAAAGCAAGCGATGAGCCGGGCGTGGTGGCTCACACCTGTA
ATTTCAGCGCTTTGGGAGGCAGAGGTGGGAGGATCGCTTGAGGCC
AGGAGTTCGAGCCCAGCCCGGTAACATAGCAAGACCCCGACCCCC
CTGCGTCTACACAAATAACAAATAAAAATTAGCCTGGCGTAGTGG
CGCACACCTGTGGTCCCAGCTACTCAGGAGGCTGAGGTGGGAGGA
TCGATTGATGGACAGAGGTCTAAGCTGCAGCGAGCCCTGATCCTG
ACAC

[0784] In some embodiments, the intronic domain that promotes trans-splicing primarily in the liver comprises or consists of sequences from the gene HPD. In some embodiments, the sequences from gene HPD comprise or consist of:

(SEQ ID NO: 728)
ACAGCGCAAGGCTCCGTCTCAAAAAAGAAAAAGAAAGTGTCCTGA
TAATGTCTGCGGGGAGGATGGATTGTAAGGATACAAGATTAGAAG
CGGGCAGCAGTCTTGAATGGTGCCTTAGGAACTGTAGTAGGGGGA
TAGTAATAGGACAGTTTGGGGATATATTTGGAGGTGGCTGAACTG
CCAGAAAAAGAGGTCATTTCCAGACTTTTGGGGTGCAGGAGCCCC
TGTGGACTTTCCAAGGATCTCACCGTGCCAGCCTCCCCTAGCAGA
GCCCCCTGTCTCCCGCCTAGGAGCTGAAAATCCTGGTGGACTACG
ACGAGAAAGGCTACCTCCTGCAGATCTTCACCAAACCGGTGCAGG
ACCGGCCCACGCTCTTCCTGGAAGTCATCCAGCGCCACAACCACC
AGGTACTGCTTGTCCCCGGCAGGCCCGAGGGGACAGGCAGCTAGC
ACACTCGGTTTTCTGGGTCCTTGGCTCATCTCCTCTCTTTCCCGC
CACA

[0785] In some embodiments, the intronic domain that promotes trans-splicing primarily in the liver comprises or consists of sequences from the gene PHF11. In some embodiments, the sequences from gene PHF11 comprise or consist of:

(SEQ ID NO: 729)
CTTCTCCAGTCGTTCCAGTCCTCCCCGGCCCTCTACTTGAGTGGG
TGGGTCTTCTGATGGGTTCCTGCCCTTGCGTGTGTGTATAGCTCC
AAACGGTGTGCCAGGCTCAGGGCAAGGTCCTGAGCATACAAAGAT
GAGTTAGGCAGACCCTGCCCTAGAGACTCTACTAGGCAACTTTAA
TGAGGAGGTCAGAACCACAGAGGTACAGATGAGAGACTCCTGACT
CCCAGTCTTCAGGGAAAGCTTTTTGAGGAGAGGATGGCTGGGCTT
ACCCTTTTTTTTTTTTTTTTTTTTTGAGAGGAGTTTCACTCTTGT
TGCCCAGGCTGGAGTGCAAAGGCGCTATCTCGGCCCACTGCAACC
TCTGCCTCCCGGGTTCAAGCGATTCTCCTGCCTCAGCCTCCCGAG
TGGATGGGATTACAGGCATGTGCCACCACGCCCAGCTAATTTTGT
ATTTTTAGTAGAGAGGGTTTCTCCATGTTTCATGGGCTTACCTTT
AAAG

[0786] In some embodiments, the intronic domain that promotes trans-splicing primarily in the liver comprises or consists of sequences from the gene PHF11. In some embodiments, the sequences from gene PHF11 comprise or consist of:

(SEQ ID NO: 730)
TAAGTCACGGGAGATGCGCTTCCATCCTGACCTCTTCCTCAAACT
CCAGACTGGTATAACCAACTTCTTCCATTTCTGAAATGATCTCAA
ACTGAGTATGTCCCAAAGAGAATTCTTGTTTCCTCCACTGTATTC
AGGTACTCCAAACCTGCTCAACCACCAGCCCATTCCATTCGCCCA
GGTGCTCCTTGCAAAAACCTTAGTGGCTCCTCAGGGCCTCTCTTT
CCTCCGGACACCCCTTCTAATGCATCAGTCGGGCCAGCCAGTTCT
GTGTTCAGCCTGACTGTATCTGGAGCCTGACTGCTTCTCACCACT
TCCATTACTGCCACCCAAGCCTACGCCATCATGATCTTCTGTCTG
GACTATTGCTTTCCTGGCTTCTATTCTAGCCTTTAATACAGGCAG
GCCTGCAGAGCGGCCAAAATGCTTTTTGAAAAACAAAAAGCAAAT
GTGATTCTCCTACTCAAAACCCACCAATAGTCTCCCATGACTCTC
AGAA

[0787] In some embodiments, the intronic domain that promotes trans-splicing primarily in the liver comprises or consists of sequences from the gene CCNB1IP1. In some embodiments, the sequences from gene CCNB1IP1 comprise or consist of:

(SEQ ID NO: 731)
TTAAGTATCATTTGTTACTATTATTTTCTCTACTGAGCGTGGAAA
GCTGGCTGAAAATTCCAGAGTGTAATTTCTGTGGGTCTGTTTCTC
TAAAACTTGCCCCTCACGCAGCTTGTACAGAAGTTAGATTGGCGC
TTACTCCCAGCTGGTGGAAGATTCGGAATTAGCTGCGCCTCTGCT
GCGTGAGAGAGGGCTCAGCTTTAAAGCTTCCCAGCTCCTCTGCTT
TCCCGCTGCCCCCTACTCTGCCGGATGTAAAATAGGCCTCTTAAT
CTTAACTGTGGCTGCCAGGTGACATACCTGAGGAAACTCACTCAG
CGGGGCTATTGGGATAAAGGTGTGCGAGTGTTCTTTTCTATCGAC
CTGGAGGGCCAAGGCAACTTTTTTTTTTTTCCTTCTGGGACGGAG
TCCGTCGCCGGCTGGAGTGCAATGGCGCGATCCCGGCTCACTGCA
AGCTCCGCCTCCCGGGTTCAAACGAGTCTCCTGCCTCAGCCTCCT
GAGT

[0788] In some embodiments, the intronic domain that promotes trans-splicing primarily in the liver comprises or consists of sequences from the gene CCNB1IP1. In some embodiments, the sequences from gene CCNB1IP1 comprise or consist of:

(SEQ ID NO: 732)
AAAGACGGAGGGTCGCTCTTGTTGCCGTGGCTGGAGTGCAATGGT
GCGATCTCGGCTCACTGCAACCTTTGCCTCGTGGGTTCAAGTGAT
TCTCCTGCCTCAGCCTCCCGAGTAGCTGGGATTGCAGGCGTCCAC
CACCACGCCCAGCTAATTTTTGTATTTTAGTAGAGAGAGGGTTTC
ACCGTGTTGGCCACGCTGGTCGGGAACTCCTGACCTCAGGTGATT
TGCCCGCCTCAGCCTCCCAAAGTGTTGGGATTACAGGCGTGAGCC
ACCGCGCCCGGCCCACTATCGCTTAATTTAAAGAGCTGTAATGCA
TGTTTGTAATGCAGACTCAAGGAAAATTATAATTTCCTTAAATGT
GTATAGAGGATGTGTGAGAGTGGAAAGATGTCTATTCCAAGGTGG
ATAAAAAATAAAATGGTGGACTACCTCAACATGGAGGTGCCAGCT
GTCCAATTACAGCTGTCACTCTGTTTCTGGGAATTTCTCCCGATT
CTTA

[0789] In some embodiments, the intronic domain that promotes trans-splicing primarily in the liver comprises or consists of sequences from the gene PSMB5. In some embodiments, the sequences from gene PSMB5 comprise or consist of:

(SEQ ID NO: 733)
AGGACTACTTGCATGACCAAAGCCAAGATGGCAGGTACGTCCTTT
TAGAATTTAAGGTTAGTGAAGCCATCTATTTCCCCGACCCCCTTC
AGTGAAAATGGTCTTTCGCATCTGGCCCTTCTTTTTGGAGGCGTG
CTTGCCAGCAGTCAAAATGGCTCCATTCCGGAATAGATTTAATAG
GAAGTGAAGCTGTGACGGCGAGGCGTTGCCCGGCCTATCTTTGCT
AGGCGTTCTCAGAATTAGTTCTTTCTGCCCACACTAGACATGGCG
CTTGCCAGCGTGTTGGAGAGACCGCTACCGGTGAACCAGCGCGGG
TTTTTCGGACTTGGGGGTCGTGCAGATCTGCTGGATCTAGGTCCA
GGGAGTCTCAGTGATGGTCTGAGCCTGGCCGCGCCAGGCTGGGGT
GTCCCAGAAGAGCCAGGAATCGAAATGCTTCATGGAACAACCACC
CTGGCCTTCAAGGTGTGGAGCCAGCCCCCTTGCCAGGCTGAGTAC
TGAA

[0790] In some embodiments, the intronic domain that promotes trans-splicing primarily in the liver comprises or consists of sequences from the gene PSMB5. In some embodiments, the sequences from gene PSMB5 comprise or consist of:

(SEQ ID NO: 734)
TCTCAACCGTCCTCCCGTCTCTGAGATGGTAAATTACTACTGACA
CTTATTCAGGTCTGAACTGAGAATCTAGTTTGTGGATTAACTGGA
CCCTTTGCTTTTTCTTCTTCCATCTGCCTTTTAGGCAATTCATTA
CTTATTCGAATTTCCACCAGAAGGTAGGAGTCAAGAGAACGAATA
TTGGATATTAATAACCGGTTACTGTTAAAGAAGGGTTGCTGTATG
GCGACTGACAACAAGAGGTATAGCACTTTTATTTTGTTGCGTTGT
TTTACCACTAATTGCTGTGGTTTAACTAATATAGGGAAATGGCCT
CAGAATGGATCATTATTTTACCCAATTTTAGAAGGTGCCCTTAAA
CAAGATGGCAACCTCAGGCGCGTTAACAAGGTGCTGAAGCAGCAG
CGATGTAACCTGTTGCTTGGACACCAGGCTGGAGTGGGAGGACTC
ACCGCTAAGGGTTCAGAACCGATTTTCAACCAGTCACGCCCTTCT
CAAA

[0791] In some embodiments, the intronic domain that promotes trans-splicing primarily in the liver comprises or consists of sequences from the gene CTAGE5. In some embodiments, the sequences from gene CTAGE5 comprise or consist of:

(SEQ ID NO: 735)
AAGTCCGGACGTGGTTGGCAGGGCGCACCGGCGCGTGCCCCGCAG
GCCATTTTTCTGACTGGAATGACGGCGGCGGCTGGCTTCTCGGGG
CTGCCGGGGTCTCCCGGGGTACGCCGCCGTCAGGACTTCTGCAGG
GCGCAGACAGCAGGCTCCAGCGAGGCTGCGGAAGGAAAGCCTTGG
GTGTCGGGGCTGGGCCTGGCGTCGGCCCCTGGGTCGGGGGGGTGG
GGGTTGCGCCGAGACGCCTCTAGGAGAAGTCTCGCCGCCGCCGCC
ACCGCGGCCGCCCGAGGCGGGTGCCCTTGGGACATAGCCCTGGTC
TTTGGGGTTGTGCGGCTCACACGACAGCGCGGAGTATGAGGCCGA
ATCTCATCCTCTAGTCCCAAGCCTCTCCACTACCAGGGCTGGGTG
GCTTCGCCAGGTAGAGCGCCGGCCCCTTTAAGAGCAAACGACCCG
GACACGTCTGCGAAGCTTGCGCGAAGAAGGGGAAGTTTGCGGCTG
TCCG

[0792] In some embodiments, the intronic domain that promotes trans-splicing primarily in the liver comprises or consists of sequences from the gene CTAGE5. In some embodiments, the sequences from gene CTAGE5 comprise or consist of:

(SEQ ID NO: 736)
TGAGCCCAGGCGCGATGAGTGTTACGTGGCCCAGGGGTCGCGGGA
GCCGCCGGGGGAAGGAAGCAGTAGACCGGCTTTGGGGTCTAAGCC
GCCGTGGTCAGAGGTCCCGAAGCCAGTCCTCGTCTGCTGCCCGGC
TCCCGCCCGTGTTCGAGGCAGTAGTTAGGCTCGTAGGGCGCTTGA
GTGGTTTTTGTGTGATGGAGGAGGACCTGGGGCTCTGGGAAGGTG
AAGAAAGCACTTGCTTAGCTGGACTTTGCAAAGATGTAAATGTTT
CCCGATTCCTAAAACTAATTAGCCTTTCCGCTATGTTGTTTATTT
TGAGCAGAGACACGTGGTTCCTTCGACTGTGAGAAACTTGAGGAC
TGTTCCTTTAAATTAGTTACATTTACTGATGTAACTTCTCGTTGA
ACCTTGAAAGAACACCTGAGGTTGGGCGGGGAGTTGAAATTTTGA
TTCTGCATTTTTTTTTTTTTTGGTAAAGAATGAATGCCCTTTTGA
GATG

[0793] In some embodiments, the intronic domain that promotes trans-splicing primarily in the liver comprises or consists of sequences from the gene SERPINA10. In some embodiments, the sequences from gene SERPINA10 comprise or consist of:

(SEQ ID NO: 737)
GTACTTTGATAATGTTCTGCTCTCCCAAGGCCACAGGGCCCTACG
ATTGTCTCTCCCTTTCCTTTCGTTAGGCCAGCATATGATTAACGC
TACGTGATTTTCTATGAATGTGTTTTCACGTTTCAAAAACAGATT
GATACACATATTGAACAGTGCCAGACGCTGTCATTTGAGGCCCTT
CCCTGGTATCCTATGTGCTTGTAGTCCTTATTATTTTCAGAGCAC
TCTACATAGCTCCCCTCTGACACTTAGAAGCATAGGGTCTTTCCA
AAAAACAGGGGGCTGGGGGATTATCTGGGGGATTTAGGATTGCAT
CATTGCTCCTTCATTTTTACTTTTTGACCAACTCTCTGCCCTTAG
ATTCCTATTATAGAAAATAGGGACACTCCACCTACTACAGTGTTA
GAGGCTAAATGAGACAATGAATGTAAAGTGCCCAGATGGGCTTGG
CACATAGCAGACACTGAGTATCTATTGTTTACTTGTTCTTCCAAA
CTGC

[0794] In some embodiments, the intronic domain that promotes trans-splicing primarily in the liver comprises or consists of sequences from the gene SERPINA10. In some embodiments, the sequences from gene SERPINA10 comprise or consist of:

(SEQ ID NO: 738)
TCCCCCTTCCTTGCCTAACGGGCATGCAGGCACTCCAATCCCCAG
CCAAACAGGGCACTGGGCAAGGCCGGCCACCCATCTGGATGGGCA
GCCTGACGACCAGATGGTCAGGGCAGTGAATGAAGCAGATCAAGG
AAAGGTGTGTGAGGACCCCTGATTCCACCTGCTTGGACCCCCACC
TTCTGTGCTGCCTCCTGCTCCCAGAGTGGACTCTCTTGCCCTGGC
CCTCAGGGAGGAGACGGGATGAATGAAAACGGGGTCAGGACTGAG
AGCTGCCTGCCGGCCTGGCAGGGAATGGGAACTGGAGGAGGTTTT
GCTCTGTGAAATAATGTCCCCTCTTTGGGTGAGCAAATGTCACCC
ACACTTGCTCTAGGTCTCCCTGGGGCAGGGCTAACCTACTTGAGC
CACAGGAAGGAGGCAGGGTCCCTGAAGAAGCTTTTACTATCCACA
AAGACATTTTAGGAGGCATTAAAACCATCTCTATCCTCTCCTCTC
CACA

[0795] In some embodiments, the intronic domain that promotes trans-splicing primarily in the liver comprises or consists of sequences from the gene SERPINA5. In some embodiments, the sequences from gene SERPINA5 comprise or consist of:

(SEQ ID NO: 739)
TCCCCTCATTCTTCTGAGCCCCAATTCAGTGATTGGTGCAATCAC
AGGCTTGGCTACAGTGACCCATTCATTGCAGGCATGGTGAGTCTC
TCAATCCCTCTCATTTCCACTAGAATCTAACTGTTGGGATCTATG
ACCCAGTCAGCATAGCAGGCCTGTGGGGAGCTCTCAGGTTCAAGC
ATATGCCCCCCCTAATCTACAAGAAATTAGCTGCAGAAAACCAAG
GAATAGAACCTGGAAAAAGAGAGGGTTTGCTAGAGCTGTCCCTTT
CCCTGTCTCTGGAATGCCAACAATAGGGAGGCTCTTTGGTCTTGT
CTCTCAGGAGTGCCCATGCCATTCCAGGAAAATGATGGCCCAGCT
GGTGGTGTAAGGCTTGGGGGGCAGCGAGTGGGCATCGTGGTGAAA
GCCTCGGGATCAGGGAGCTGCGTCTGCAGGCAGGCCTGCTGGCCG
GAAACCTGCCAGGAAAGGAAGGGGCTGTCCCGGGGCGGGGCCAGG
GAGG

[0796] In some embodiments, the intronic domain that promotes trans-splicing primarily in the liver comprises or consists of sequences from the gene SERPINA5. In some embodiments, the sequences from gene SERPINA5 comprise or consist of:

(SEQ ID NO: 740)
TAAGTACCGATGCCGCAAAGGGAGGTCCCCAGGGCTTGAGGGCAT
GTGAGGCGAGGAGAGGATGGACTCTAGAGTTTTGGGGTTTGGGGT
CTGCAAAGCTCTGAAGGAGTCTCATCTCTGCAGTTTCAGGTATCC
AAGGCAGCAGAGGTGAGTGGGTCCCCCGAGCTCTGTGACCTTATG
CTCCACACTAACTCTGGCAGAGCCTCCGTTTCCTCATAGGTAAGA
TGGAAATAATTACACCCTCTGGATGGTGTGACTGAAGATTAAATA
CAGCGGGTGCTCTCACTCAGCACATCTGGCCATGTCTGCAGACAC
ATTTGGTTGCCACAACTGGAAGGGGGGTGGGGGTTAGTGACATCT
AGAGGCCAGCGATGCTGCTGATGATCCCACAATGCCCAGGACAAG
ATCACAAAGCATCATCCTGTTCAAAAGGTCAACAGGATCAAGGTT
GAGAGACCCTGAAATAAGGCCATGGGGACAAAATGTCGGCTGGAT
AGGA

[0797] In some embodiments, the intronic domain that promotes trans-splicing primarily in the liver comprises or consists of sequences from the gene PPP2R5C. In some embodiments, the sequences from gene PPP2R5C comprise or consist of:

(SEQ ID NO: 741)
AGCGTGGTGGCGGGTGCCTGTAATCCCAGCTACTAGGGAGGTTGA
GGCAGGAGAATCACTTAAACCTGGAGACGGAGGTTGCAGTGAGCC
GAGATCACGCCACTGCACACCAGCCTGGGCAGCAGAGTGAGACTC
TGTCTCAAAAAAAAAAAAAAAAGTGAGCAATATCTGTGGTTAATC
TCAAATAGGGTGGCTTTCCGTGTCATTTCCCTTTAGTTGTTTTTA
AATGCAGATGTTGCTTTAATTAAATAATATTTGAAATAAGTGGGG
TCCCAACTATAACCTTATATCTTATTGTTTTTAAATGTTGATATT
TTGGTGTTTTCAGTAGAATTTGAGCTGTTAACAGTGATTAGGTTT
TTTCAGTTTGTCATCGATGTATGTGACCTCGTTATAATACACATG
GATTTTTGTCTGCTGGTTGTGTTACTCATGAGCAATGTGTTCTAA
TTATGGTATTTTAACTTATAACTTATGAAAAAGTTATGTTTCACT
CTAG

[0798] In some embodiments, the intronic domain that promotes trans-splicing primarily in the liver comprises or consists of sequences from the gene PPP2R5C. In some embodiments, the sequences from gene PPP2R5C comprise or consist of:

(SEQ ID NO: 742)
TGGGTGGTGAGGGTGTCTGTATATGTGTGTTTACATTTGTAGACA
GTTTCTGTACATGTATAATTAGGAATGGGTTGTCGGTTTTGGTTT
TTTTCCCAGCTTTATGTAATTGGTCAGACTTCTCAAAGGGGGGTA
GCACTTGATAATCGCTCTCTTGGAACTCTGAAGCCTTTGCATGGA
GCAGTGTTCACCCTGGGCAGCCTGTGGCCCCTGGGGTCACAGAGC
TGCTTTCCAGGGGGTTTGCAAGGCCGTCACTGCCTCATAAGATTA
CCAAGATCTAATTTACCTCTCACTGTGTGGACGTTTGCCCTGGTG
GTGCAAAGGCAATGGTGAGGAATATGGCGCCTTTCTTTCATCGAG
CAGGACAGCGGTGTTCAGCTAGCAACACACCAGTCTGACCCAAGA
ATGTCCTCGATAAAGCATGAAGTTACTGGTTTTTTAAGTCTCAAC
TCTTTTGTATACCTTTTTAATTTTGTTTTTGTTTGGGTTTGTTTT
TAGT

[0799] In some embodiments, the intronic domain that promotes trans-splicing primarily in the liver comprises or consists of sequences from the gene SERF2. In some embodiments, the sequences from gene SERF2 comprise or consist of:

(SEQ ID NO: 743)
AGGATCCGGCGTCCGGAGCCCGGGATCACCTGCCTAGCGGGCTTC
ACTTGGAGAGGTGGGGAGGCCAGAGCTTGCGGAAGCCGCTCCCTC
TCCCCTGCACCTTCTCCAGGGTCGCCGGCTGAGGCCCAAGGTCCC
TAGGGGCAGTGACTAGAGAAGAAGGGGGCCGGCCGTACCTGTTGC
CGCTGACACTCTTGCAGCGCCCGCAGGGCAGCGTCGTTGAGCCTG
AGCAGTAAGAGGCTAGTCCGGGCAGCTTGCGTGAAGCAGAGCCGG
AGCTGTCCTCTCAGAGGCTCCTGGAGCTCCTCCATGGCGACGAGT
TCGAGTGCAAGCAGCACGGGGGCCACAGGCGAGGGCCACCACCGC
CACCTCCTCTGTTCAGGGTTTGGTTGGCACACCCGGTAACCCACG
TCTGCCCCACCCTCCGCCAGGAACCCGCCCCCGGCCCCACCTCCC
GCCAGCGCCACCCCAAGCTTTCCCAGCCGCGTGGGCGGCGCTTCG
CTCT

[0800] In some embodiments, the intronic domain that promotes trans-splicing primarily in the liver comprises or consists of sequences from the gene SERF2. In some embodiments, the sequences from gene SERF2 comprise or consist of:

(SEQ ID NO: 744)
TAATTGGGGCCCTGCGGTTGTGGTGGCAGCAGTGAAAGTTGGCTG
TCACCGACTGGAGCGCCCCCAGTTGGTGGGCAGGGATACGGGCGC
GGGTAGTGGCAGGAAAGTTGCAGGGCAGAGAGCCAGAACCCAGTC
CTAGGTCTCACCTCGTGGCCTAAACACGCGTCAGAGTGGTGAGAC
CGCTCCCTGAGGAGGGCCAGGAGCTGCCATGAAGTCGCCAGGCAT
TCCAGAGGGCCAGATCCTGGTGCACTGAGACCCCAGCACCAACCT
CTGGCCAGCCCTTGGTGTCTCCACTTGTTCCTGTTTGATTATGTT
TCCCAAGAGCCCCGATGTTGTCCTGTTTCCTAAACAGGATCCCTC
TGTTAAATCCCTGGACCTGCACAATCCCCGGGAACCTTAACGTCC
TCTACTACAAATAAAATTACCTATACATTTGTCAAAACTCATAAA
AAAAAAATACATTTTTTTTTTTTTTTTTGAGACGAAGTCTTGCTC
TGTC

[0801] In some embodiments, the intronic domain that promotes trans-splicing primarily in the liver comprises or consists of sequences from the gene AQP9. In some embodiments, the sequences from gene AQP9 comprise or consist of:

(SEQ ID NO: 745)
GCCCGCTGCTGTGGCAAGAATGGCCTGGGGTCAGTGCTAGCTGTG
GCAGTGGCTGCAATACCCCTGGCTCTAAGGGCATCTTCAGTATAC
TGCAACACCCTCAAATTCTGGAGTGGTATTAGGGGTTACTGAGAG
CCCTCTGGGAATTATAAATTATTCCTAGAGCAAGACCAAGCCCCA
CTTTGGCTTACAGTTGACCTCGAAAACTCCAAGAATTCCCCCAAA
AGAGAACTCATTCCCAGGACCCTATCGAAGAATAATTTGTCCAAG
TTTGCAGTGGGCCATTCAGAGAGGCCAAAGGCCTTCTTCCTTTGA
CCCTCCATCCTGGGATTCACCTGGGCATCTCTAAAACTATCATTC
CTCGGAAGTAGAGAGAGACAAATGACATGGCTATGCCAAGCTCAA
TCTGAGTGACTGGTTGTTTAGCACAAGGCTTGGCACAGGCCTCCT
TCAACTCTTCCCAGGGAACACTAATGTGCCAGAGCTTTCTCTTTC
ATAG

[0802] In some embodiments, the intronic domain that promotes trans-splicing primarily in the liver comprises or consists of sequences from the gene AQP9. In some embodiments, the sequences from gene AQP9 comprise or consist of:

(SEQ ID NO: 746)
TAAGTGTAGATTCAACAAAGACTTAACTTTGGTGAAAAGATATGC
TCTCATAAGGGGAATGCATTGGAGAATTAGAGACCAATCAGAAAG
GAGAGATTATATTTCCAAAGGCAGAGGTTGCTGGGCATAACCCAA
GCTTTCTTGATAATCGTTTTACCTTTACAAGGAGCTGATACCACC
AGAAAAGTTTTCTCCTTCCTCTTTAATACGTACACTTGTTTAACA
TTAGTTGAGATCCAGAAAAGAGTGAATGACTAAACATTTCAATCC
CTGTAGACACAAATGGACTTCACTTCACTATTGACTCTTTTGAAC
AAGTGGTCTAAGTGTGGAGGCCACAAGAGAAGATATTTCTATTTC
AAATCAAAGACTGTGAAGGGTGGTAGTTGAGCCTAGGGGATCATC
AATCCTCTCTGTCTCACCATGTGCATAGGTTTATTTATTTAAACT
CTCAAGGTGGCTAGAAGTATCTCTGCTTATTGACCTTTAAACAAG
CTTC

[0803] In some embodiments, the intronic domain that promotes trans-splicing primarily in the liver comprises or consists of sequences from the gene ANPEP. In some embodiments, the sequences from gene ANPEP comprise or consist of:

(SEQ ID NO: 747)
GTAATCCAGCCCTGCCTTATGGGCAGCAGCCCCCACCCCATACTC
CTAGCTCCTGGCCCATGTTCTGAGGGCTGTGATGGGCCATTCCAT
TCAACAAATGGACTTGACTTCTTTGGTTCCAATCTCCACTTTGCT
GCTGCTTCGCTGTGTGACTCTGGGCAAGTTACCATCCCGCTCTGG
TCTCTAGTTCCTCTTCTATAAAATGAGGCTAAGAGCAATACTCCA
TTAGTTATGTGAGGATTAAAGGAGAGAATCCTAGGCCAGGCATGG
TGGCTCATGCCTGTAATCCCAGCACTTTGGGAGGCCGAGGCGACC
TGGGGTCAGGAGTTCGAGACCAGCCTGACAAACATGGAGAAACCC
CATTTCTACTAAAAATACAAAATTAGCCAGGTGTGGTGGTGCATG
CCTGTAATCCCAGCTACTCTGGAGGCTGGGGCAGGAGAATTGCTT
GAACCTGGGAGGCAGAGGTTGCAGTGAGCCAAGATCGCACCATTG
CACT

[0804] In some embodiments, the intronic domain that promotes trans-splicing primarily in the liver comprises or consists of sequences from the gene ANPEP. In some embodiments, the sequences from gene ANPEP comprise or consist of:

(SEQ ID NO: 748)
CGAGAATCTGCAGGAGATGCCCTGGATGGCAGGGACTGGAGGGTC
CCACTGATGGCCACGCCCTCTCGCTCCACCCACAGGCTGTGAACA
ACCGGTCCATCCAACTCCCCACCACCGTGCGGGACATCATGAACC
GCTGGACCCTGCAGATGGGCTTCCCGGTCATCACGGTGGATACCA
GCACGGGGACCCTTTCCCAGGAGCACTTCCTCCTTGACCCCGATT
CCAATGTTACCCGCCCCTCAGAATTCAAGTGAGCAGATGGGGTCA
CTGAGGCATGGTCAGGTGGGTGGGGTAGAGGGCAGTTACTAAGGG
ACCATAGTAGGACTGGCCTCCTGTGGTCCCAGCCCCAGCCACTGT
AGACAGACCCTCCCTCCAGAGCCAGGAGTTCAGGGGCACTCGGTG
CCAGAGCTGGGCAGAAGCTGGGAGCCTGGGCAGCTGCTCCTCACT
GGCAGTGACCACACCGCCATCTCTCACCACCTCTGGATCTTTAAT
TGCA

[0805] In some embodiments, the intronic domain that promotes trans-splicing primarily in the liver comprises or consists of sequences from the gene PCSK6. In some embodiments, the sequences from gene PCSK6 comprise or consist of:

(SEQ ID NO: 749)
ATGAAAATGAAAATGACAGATCTGAGGAAGAGGGAGAGCTCTCTT
GAAACCCCTTTCCCAGATTTGCCCTCAGTTTTAGGAATGAGGTAC
GCTTGGGCATTCCTGTTGCCTGCATGGTTCGGCATTCTGGCAGCC
AGGTTCGCCCCAGAATAGATAAGTGTGTTTGATTTTCGAACATTT
GACTTTATTACCTATTTCCAGAAACACTTCGTGTTCAAACTACGT
CTCTACAGGCATTTCTACTTGGTCTTTTTCTCCCCTGACATTTCA
CAGAGTCCTAACTGTGCTGCATGTATAACTTGTTCTTTCTTTTTG
TTACTTGCATAGCAAGCATGTTTCTATGTCATTAAATATCCTTTG
TAAGCAGCATTTTATAGATTTTTATAATACTTCACCAACAGAAGC
ACCATAATTTATTTAAGCATCTCTCTATTGTTGGACATGTAGATT
GCTTTCCATTTTTTCCTATTATGAGCGGACAGCTTAGTACAAAAA
GCCT

[0806] In some embodiments, the intronic domain that promotes trans-splicing primarily in the liver comprises or consists of sequences from the gene PCSK6. In some embodiments, the sequences from gene PCSK6 comprise or consist of:

(SEQ ID NO: 750)
CACTTCCTTGCCTCGGCTCCCCCAGCCTCCCCCACGGTGAAGCCT
GGGCGTTGGAATGGCTGCTGACGTTCCCACCGGGGAGGAGCAGCG
GAGGCGCAGGGGCCGGTCCGACCCAGCGGGACCCCGGGGGGGCGG
GGGTTGTGGCTTTTCCCTCCACTTCCAGGTGAGGCTTGGTATCAG
GCCTCCCCAGCATCTGGCTGCCTGGAGGGGGCAGGTAACACAACC
CAGAAGGAAGGTTTACCCAAGGAAAGACAGGACATAAAGTGTATG
CCCTTCCTGTCTGAGGGCACATTGGTCTCACAAGGCCTGTTTGGA
AGACTTCCCCCAGCTAAGCAACCACCCCGTTTCTTTGTGGAGCTG
CAGCCAGCTTGAAACACAGCTCCTTCCATTTGTCAACCCCGGGCG
CTTCCTCCTGCTGCCCTCCACTCCTGTTGCCCTGGGATTGCACCT
CCCAATAAAGCTTCAGCCCATGGGCTTCACTTCAGTCCCTTGTTT
TCCA

[0807] In some embodiments, the intronic domain that promotes trans-splicing primarily in the liver comprises or consists of sequences from the gene ACSM5. In some embodiments, the sequences from gene ACSM5 comprise or consist of:

(SEQ ID NO: 751)
GTTAACTATGGAAAGAAAAGAAGAAAGACAGGCAAGAAAGAGGGA
AGAAAATAGGAAGAAAATGAAGAAGGAAGGGAGGGAGGAAATAAA
GGAAAGAGAAAGGAAAAGAAGGAGGAAAGGAAGGGAAAAAGATGA
ATGGAAGGAAGGAAATAGGGAACAAAGAAGAAGGGAGGAGAGAGG
AAAATGGAGAATGAAATAACGGGGAAAAGAATGAAAAAAAGGAGG
AAAGAAAATGAAGGAGGGAAGGAAGAAAACAGGAAAGGGGAAAGA
AAGGAAAGAAAGAGGAAAGGAAGGAGTGAGCAAGGAAGAAAAAAG
AAAAGAAAGAAGGGAGGAAGAATGGAGAGAAATGGAGAGAGGAGA
AGGGAAAGAAAGAAGAAAGTGAGGGAGGAGAAAAAAGAGGATGAG
AGAAAGAGTTATCAGGCAGGGTGAGAGAAAGGCATGGCCCAGGAA
AGAAGCTAAGTGGAAAGGCTCTTCTTTATCTGTACTGCGTTCTCC
CCAG

[0808] In some embodiments, the intronic domain that promotes trans-splicing primarily in the liver comprises or consists of sequences from the gene ACSM5. In some embodiments, the sequences from gene ACSM5 comprise or consist of:

(SEQ ID NO: 752)
TAGCAGCCTCCCCCAACTTCTGGCAAGGCCTGGCATGGAGAGGAG
AAAGACACACAGGCCTGGTTGGCACGGGCTGCTGGGCTGCTGGGA
GAGGCCCAGGGTGTAGACACTCACGTATGCACCTCTGTGATGATT
TCCTTACCAGATTGTGGATGATGAGGGCAACGTCCTGCCTCCTGG
AGAAGAGGGGAATGTTGCCGTCCGTATCAGACCCACTCGGCCCTT
CTGTTTCTTCAATTGCTATTTGGTAAGAGACGGGGAACAGCCGTT
CTCATGACAGTGACTGTGTGCTAAGCATTGTGCACCACACTTTGT
AAATATCTATTTGTTTAATCCTTACAATGACTGCATGAGGTAGGT
TGCTACTATTATTAATAAAGTTCTGTTATTGATAAGGAAGACTAT
TATTGATAAGGAAGCTACTACAAAGGGGAAGTGACTTATCCAGCA
TCATGCAAATAGTACAGGCAGGACATGGGATTTAAATGTGGGTGT
GTCT

[0809] In some embodiments, the intronic domain that promotes trans-splicing primarily in the liver comprises or consists of sequences from the gene ACSM3. In some embodiments, the sequences from gene ACSM3 comprise or consist of:

(SEQ ID NO: 753)
GCTGTGGATCAGAGGACCCTGTGCCAGATCATACAACTCCTTGCA
GTTCATGTAAGGACTCGGATTTTACCTGGAGTGGAAAAAGAAGCA
CTGAAAGATTTGAGCAGGGGAGTAACCTGATAGCGTTTATGTTTA
GTCCTGCCACTTCGACAGATAAACGCACCAATGGGCTTGATGAGA
TTTAGGCCAACCCATAACCGCCCCTCAACTTCTTTCCTTTCAATT
TCAAAACTCCTCTATGGCTTCCTCCATCTGTTCTTCCTTCTGAGA
AGTGCTCTCTCTGCCCCTTTACAGAACTAACCACTTCGGCAACTC
CTTGGACACTTTCCTTCTTGTTAATAATTTGCTTTCTCCGCCCCT
CAAAAGCTTGCTGTTTCTGTAAATCATTACCTGTAAGAGGAACCG
CTGGGAGTCCTGTAAACTTTAGCCCAGAGCTTGGCTCCTCCTCCA
GAATGTCTCCACCAATCAAGGAAAGTGTTTTGGGCCAGTCTTGCT
CCTC

[0810] In some embodiments, the intronic domain that promotes trans-splicing primarily in the liver comprises or consists of sequences from the gene ACSM3. In some embodiments, the sequences from gene ACSM3 comprise or consist of:

(SEQ ID NO: 754)
TGAGTACCTCATCTCCCCTCCTGTGTAAGATTTCCTGAACTGGCA
CATCTGTTTTTTGAGCAAAGATAACAAACAGATGAACAAAACCAA
CAATCAAAAATGCTGTCATTAAAGTCTTGGGCAGCCAAAGTTTCT
CTCAGAATTTCTCAGTTGTGTGATACTATCTATTAAGTGATGAGG
AGTATGCACACACAAAAGGCTATAAATGTAGCAGCTGAGTTTTCA
TGTTGAGCCTTTTGGTGCTATTTGATTTTTTGAAAAACTATGTAC
ATGTATTAAGTTGATAAATTTTTTTTTTAATTTTAATTGAACCAG
ATGCGGTGGCTCAAGCCTGTAATCCCACCACTTTAGGAGGCTATG
GTGGGCAGATGCAGATCACTTGAGGCCAGGAGTTCGAGACCAGCT
TGGCCAACATGGTGAAACCCTATCTCTACTGAAAATAAAAAATTA
GCCAGGTGTGGTGGCAGGTGCCTGTAACCCCAGCTACTTGGGAGC
CTGA

[0811] In some embodiments, the intronic domain that promotes trans-splicing primarily in the liver comprises or consists of sequences from the gene TMED6. In some embodiments, the sequences from gene TMED6 comprise or consist of:

(SEQ ID NO: 755)
GTCTGTTTTCATTACCATGGCTATTATAATAATCATAGGGTCCTA
TGAAATTACAGAAATAATGAGGAAGTATACAGAGATGTTTTAACA
GTAGGAAAAAAATTCAGCCTTTAACACCAAAAACCAGTGTTCCTG
GAGGCTGCTGACCTCCAAGGATGCCAAGTGGCAGTCTACTGACGA
TTTGGGGGCAACACTCCAGGTGAGCATTCTAAGTCTAGGGTTCAG
CCGCTCAATTTTATCTCATCATCTCCAGTTAATCAGATTCTGGGA
AAGTGACCAAAAAACAGAGACCCATTTATAATACAGAATTCCAAT
TAACAAATGGATTACAGGGAAGCATGTCTTTCCAGTCATCAGAAT
ATTTGAGTCAGTTACTAAAAGCAGATTCAGAACAAAAGAAAATGC
ATGATATCCATGTGAGATATCCACACTCCACAGCAAAGCACTCCT
CCAGCCAGGTCAAGCCTGTCCCACTTTGGAGAGCAGCAGTGTCTT
AACT

[0812] In some embodiments, the intronic domain that promotes trans-splicing primarily in the liver comprises or consists of sequences from the gene TMED6. In some embodiments, the sequences from gene TMED6 comprise or consist of:

(SEQ ID NO: 756)
TATAGGCGCACGCCACCATGCCAGGCTAATTTTTGTATTTTTTAA
GTAGAGACAGGGTTTCACCATGTTAGCCAGGCTGGTCTCGAACTC
CTGACCTTGTAATCTGCCCACCTCGGCCTCCCAAAGTGCTGGGAT
TACAGGCGTGAGCCACCGCGCCCGGCCCAGAATCATACATTTTAG
TGGATCCACACTAGCTGTGTGTTCCGAGCAAGGCATGTCTTCTTC
ACACGGGTGCTGTTGGCATTCTGGGCAGTTCTTTGTCCTGCTGTA
CTGTTTCTTACATTGCAGACGTTCAGCAATGCTGTGCTGCCTCCC
CTTAACACCATCACTGTGATACCTCAGAATCCTCCAATCAACTCC
AAACCCCAGCAGGGGGTTGGGCAGTCCCACCCCAGACAGAGACCG
CTGTGCTGATGACCGTGGGACGTCAATCTTACCACTCAGCTGGCT
TCCTCGTGATGTAGCAGGGGTTCTGCTACCTATTTAATGTGTCTT
GGCA

[0813] In some embodiments, the intronic domain that promotes trans-splicing primarily in the liver comprises or consists of sequences from the gene HPR. In some embodiments, the sequences from gene HPR comprise or consist of:

(SEQ ID NO: 757)
AGGGGGCTGGGCGTGATGGCTCACACCTGTAATCTCAACACTTTG
GGAGGCTAAGGCGGGTGGATCACTTGAGGGTGGGAGTTTGAGATC
AGCCAGAGCAACATGGAGAAACCTCGTCTCTACTAAAAATACAAA
AAATTAGCCAGGCATGGTGATATATGCCTGTAATCCCAGCTACTC
GGGAGGCTGAGGCAGGAGAATTGCTTGAACCTCGGAGGTAGAAGT
TGTGGTGAGCTGAGATCATGCCATTGTACTCCAGCCTGGGCAACA
GGAGTGAAACTCTGTCTCAAAAAAAACAAAAAACAAAAAAGAACA
CCACGGGAAAATCAAGTGTGAAGCAAGAGCTCAACTCTTAACAGG
GGCAATGTTTGGAGTTTTGTTACTGGAAAAGATAGAGACCTTACC
AGGTCCAAAGTTTGTAGACACAGGAATTACGAAATGGAGAAGGGG
GAGAAGTGAGCTAGTGGCAGCATAAAAAGACCAGCAGATGCCCCA
CAGC

[0814] In some embodiments, the intronic domain that promotes trans-splicing primarily in the liver comprises or consists of sequences from the gene HPR. In some embodiments, the sequences from gene HPR comprise or consist of:

(SEQ ID NO: 758)
TGGGTCCACAGCTTTCCCTCCTGCCTTTCCTCTGGTTCTTTATTT
CAGTCTTTTTTGCATACATTGGTACAGATGCAGAAATAGAACAAA
GAAACAGGGCAAATGGGCTAAATTATAGTGAACCAAAGGGCTTAG
TGTGTTAAATCTTCTCCTTTTCTGCATCCATAGAAGACAGTGCTG
CTGTCTTTCCCAGGAGATAAGATTTACTCTCAGGAGTGTCTTTTT
CCTTGAGGTTACGTTTTTGTCTTTGTAGGGTATGTCATCAGCTCC
CGTGGTAGGCTTCCTGGCATTCGGAATATATTTACTAGCAGATAT
TTTCCTCTTTAAAAATGTATAATAAGAAAGACTAATAGTAACACA
TTTGAATGACACAATTAATTGACTAGTACTTGGGATACACACTAG
TACCTGGGATACATCTAATTAAGACACTTAGATCTTAAAAAATAA
AAAGACTTTTTGAAATGTTGAAATAATAAGACTAGAAACTTTTTT
TTTT

[0815] In some embodiments, the intronic domain that promotes trans-splicing primarily in the liver comprises or consists of sequences from the gene SERPINF2. In some embodiments, the sequences from gene SERPINF2 comprise or consist of:

(SEQ ID NO: 759)
TGTCCCCCAGGCTGGAGTGCAGTGGCTTGATCTTGGCTCATGGCA
ACCTCTGCCTCCCGGGTTCAAGCAATTCTCCTGCCTCAGCCTCCC
GAGTTGCTGCGATTACAAGCGCCCGTCACCACAGAAGCCCAGCTC
ATTTTTGTATTTTTAGTAGAGATGAGGTTTTGCCATGTTGGTCAG
GCTGGTCTTGAACTCCTGACCTCAGGTGATCTGCCTGCCTCGGCC
TCCCAAAGTGCTAGGATTACAGGCGTGAGCCCCCATGCCCGGCCA
CACTGCTAGAAACTTTAAAAGCATCTCATTCGGTTACGTGTCCGC
CTGCAGTGGGACAGGTAGTATGACTCCACCCCACTGTGAGGAAGT
GGAGGAGCAGTGGGGTCAGTCACACGCCTGGCAGGATGGCCAGGA
GCCCCATTGTCTGCCTTAGGAGCACCTGCTGGCCCCACCCCCACT
TAGCTTCGGGGCTTTCTGTCCTCATGCTCTTCCCTTCCCTTTTCT
GTAG

[0816] In some embodiments, the intronic domain that promotes trans-splicing primarily in the liver comprises or consists of sequences from the gene SERPINF2. In some embodiments, the sequences from gene SERPINF2 comprise or consist of:

(SEQ ID NO: 760)
TAAGGAGGAGGGTGCGGGCGAGCCCCCGAGGTCAGGCTGGGCAGG
GCGGGTAAGGAGGAAGCGTCTGGCTGGCAGTGGAGCTGAGTCAGA
GCTGTCCTGTGTCCTGCTCTTTTCCAGGGCTTCGGGAGCGGGGAG
AGGGTTGAATATGAGCCCCCAGACCCTCTGTCCTAGAGGAAGTTG
GGGTGGCCCGGGGAATGGGGCTCTGCTTTGCTGCCCAAGACCTCG
CATTGCAAGGAGAGTCTGGGTAGAGAGCCTGGGATGGCATGTGAG
CCTCGCTGGCTTCCCTGGAAGGGGAAGGAGGAGAAGCTGGGGTGT
CACACTGTTAAAGAAATGCTGGGTGGAGTGGCTCATGCCTGTAAT
CCCAGCACGTTGGGAAGCTGAAGTGGGTGGATTGCTTGAGCCCGG
GAGTCCGACACCAGCCTGTGCAACACATTGAAACTCCGTCCCTAC
AAAAAATACAAAAATTAGCCAGGTGTGGTGCATGCTACTGGGGAG
GTTG

[0817] In some embodiments, the intronic domain that promotes trans-splicing primarily in the liver comprises or consists of sequences from the gene SLC13A5. In some embodiments, the sequences from gene SLC13A5 comprise or consist of:

(SEQ ID NO: 761)
CTGTGCTGCTGACTTGTCTCTGGTTTTCTGCAGTGTGGGGAGCCC
AGGGAGGTGGATGAATGAACAGTTAGTTACGCCCTGCCCACCTGC
TGGGTGCCAGGCCTTCCTGTCCCTGTTGAATCCACTAGTTATCTC
GTTCGATCTTTGCAGCAACCCTGTGAGATAGGAAGGTGTTATTAT
CTTGCTTTGTCTTTCAAAAAAAAAGCGAGGCTCAGGGAGGCCAAG
GGAAGTGTCCAAAGTCACACATCAAGTTACTGGCAGTTACAGTTC
CAACCAAGAGCTTCCAACTCCATACCCCCTGCTCCTTCTGCTAGC
CATGAAGGGCTTTGGCCTTATAGGGCTTGTAGGGAAAGGTGAGTG
GCCAAGAGCAAGTCCATGCCAAGGGAAGATCTCCAAACATGAGTC
CCTGTCTGTTGCCTCCCCTGAGATAGGCACAGGACAAGTGATCAA
TGAGACAGGGTGGTCCTTGCCCTAAGAAGCAAAGTGTTTGGTTGG
GGAG

[0818] In some embodiments, the intronic domain that promotes trans-splicing primarily in the liver comprises or consists of sequences from the gene SLC13A5. In some embodiments, the sequences from gene SLC13A5 comprise or consist of:

(SEQ ID NO: 762)
CCATGGACTGCAAACTTGACTCCAATCCCCAGTAAAATATCTACA
ACAGGGTAGTGAAGCGATGGTTAGTGACCATGAGGGAAGCTTGCA
GAGCAGGCATCAGAAAGAGCCTGAGGAGGTCCACAGGGAAGCTGG
CACGTCCTTGTAGGATAGTTAAGGCACTGGGGTGAGCAATGAACC
TGGACTCACGGAACACTGGGCTCTGTGACCGTTTCCCTGAATGGC
CTAAGCTGTTGCCTCCTGTCACTTCTCTGAGGTCATTTTCCAAAT
GCGCACGGGCATAGAGAACCCATCCACTCTGCCTACTTCCCAGGG
ATGCCTTGAGCACTGAGGATACCTGGGGGACATGAAGTCGCACTG
TCCTGGGGGTCGGGACACCCCAGCCAGGGACAGAGCATGGCACAG
GGACATCGAGGCCCAGTGAGCCGACCCTTTGTCCTCCTCTCTGAG
AGCACTAGTCCCCAGCAGGCCTCAGGGTGCTGACTCTGTCTCTTT
TCCA

[0819] In some embodiments, the intronic domain that promotes trans-splicing primarily in the liver comprises or consists of sequences from the gene ASGR2. In some embodiments, the sequences from gene ASGR2 comprise or consist of:

(SEQ ID NO: 763)
GTGAGGCCACGCTTCCCACAGGCAGGAGGAAGCCCTTGGAAGGCC
TGCTCTGGGAGGCTGGATCAGGCTTATTTTATCCATTTTTTTTTT
TTTTTTGAGATGGAGTCTCGCTCTGTCGCCCAAGCTGGAGTGCAG
TGGCACGATCTCGGCTCACTGCAAGCTCCGCCTTCTGGGTTCACG
CCATTCTCCTGCCTCGGCCTCCCAAAGTGCTGGGATTACAGGCAC
GTGCCACCATGCCCGGCTAATTTTTTTGTATTTTTAGTAGAGACG
GGGTTTCACCGTCTTAGCCAGGCTGGTCTGGAACTCCTGACCTCA
TGATCCGCCCACCTCCGCCTCCCAAAGTGGTGGGATTACAGGCGT
GAACCACCGCGTCTGGCTGAACTTCAAAGTATTTTAATGCCACAG
TAGTTAAGCCATATGATACAGGGGCCAGAATATATGTATTGTTTG
CATTACATCAGGCTCTGTTAGTACTTTACAGCATACTGTGAGTAC
GAAC

[0820] In some embodiments, the intronic domain that promotes trans-splicing primarily in the liver comprises or consists of sequences from the gene ASGR2. In some embodiments, the sequences from gene ASGR2 comprise or consist of:

(SEQ ID NO: 764)
TGTGTAGTGTGGTGTATATGTGTGTGTTGTGTGTGTATGCATGTG
TGGTGGTGTGTGTGAGATGAGTCTGTGTGTGTGCGGTATGGTATA
TGTGTGTGTACGCATGTGATGTGTGTGGTGTGTCTCTTGGTGTGT
TTGTGTGTGTGTGATGGATCTGTGTGTGGTGTGGTCTATGTGTGG
TGTACATGTCTGTGGTGTGTGTGTGGTATGGTGTGTGGTGTGGTC
TATGCATGGTGTACGTGTCTGTGGGTGTATATGCTTCCCCAGCCA
CAGGCTGGAGCCTAGCAGGTGGGGACCACACCTGCCGGCAGCACT
TTCAGCCTGTCTGTCCTAGATCACGATGCCCTGCTCTTCCATCTG
AAGCACTTCCCCGTGGACCTGCGCTTCGTGGCCTGCCAGATGGAG
CTCCTCCACAGCAACGGTAGGGGTGGGGCCGTCTCCAGGCCCAGT
GTGCCTGCCCCTCCGGCTGGATCTCATCTCCCTGCCCCCTGTCCC
CTCA

[0821] In some embodiments, the intronic domain that promotes trans-splicing primarily in the liver comprises or consists of sequences from the gene TMEM220. In some embodiments, the sequences from gene TMEM220 comprise or consist of:

(SEQ ID NO: 765)
GTCAGGCGGCCGCGGTGGGAGGGGGACCCGCCCGGCTCCCAGCTC
CGCCCCCTGGCCTAGCGGGCCGTGTAACTGACTAGCGGGCAGAGT
CGCAGGGGCGCACAGTTAGTGGGGAGGACGGGACTTGGGCTTTCT
GCTTGGGGAGCCCCCACTTTCTCCCCCGTCTAAGAGACGCGGATG
TGTTCATGGAAGCGAGTCCCATACCAGGGCTCACACCCTGGAAGG
GGCTGGTTCCGCGCGTGGAACTTCCCAGGGGACCTCAGAAGAAGC
GGCCCTGGCTCCTGCGTTAACGTCCGGCCCGCGGACGACACTGAA
CATATCTCAGGGCCTAGGAGACGAAGCCGACCAAAACCCTTTATA
GCATCATTAAACTTTTTAGTCGGCTTGGGGACCCCCTTCATAATC
ATTTCCCTCATTTCTTGAGACTGGTGGGGGTGGAGGGCCCTTAAA
ATACCCGTTCTGGGTTGGCGAGTCCTCTCCAGAGCTCCCGTGAAG
GCTT

[0822] In some embodiments, the intronic domain that promotes trans-splicing primarily in the liver comprises or consists of sequences from the gene TMEM220. In some embodiments, the sequences from gene TMEM220 comprise or consist of:

(SEQ ID NO: 766)
TGAGCCGTATAAGATGTTAATATAACTGTCGTCACTCTAGAAATT
ACCATAATGCTTACAGGGATTTGAAAGTTCCTGAGCTTTGGAAGG
AAATGCATAAATACTAAACAGAACACACACACACACACACACACA
CACACACACACACACACACACATCTCTTTTTCTTTCTCTTTCTTA
TTTTTGTAAAAACAATTTTTATCCTTTTTTTTTTGAGGAGTCTCG
CTTTGTTGCCCAGGCTGGAGTGCAGTGGCACAATCTGGGCTCACT
GCAACCTCCGCCGCCCGGGTTCAAGCAATTCTCCTGCCTCAGCCT
CCTGAGTAGCTGGGATTACAGGCTCCCGCCACCACGCCCGACTAA
TTTTTTCGTATTTTTAGTAGAGATACGGGGTTTCACCATGTTGGC
CAGGCTGCTTTCGAACTCCTGACCTCAGGTGATCCGCCCACCTCG
GCCTCCCACAGTGCTGGGATTACAGGCGTGAGCCACTGCGCCCAG
CCCT

[0823] In some embodiments, the intronic domain that promotes trans-splicing primarily in the liver comprises or consists of sequences from the gene NCOR1. In some embodiments, the sequences from gene NCOR1 comprise or consist of:

(SEQ ID NO: 767)
TCTGAATTTTCAGAGTGAGAATTGTTGTCCTGTCCTTGAAGCAAA
TCACCTTCAAGTATTACAGTGTAATATTCACATTCTCTGGTAGAT
GAGAGACACAACTTTGTGTAGTGGATATTTCCAATCAGACGCTGG
CTAAGCCTTCACCTTGGCATTTGCCAGCTGTGTGGCCACAGGCAA
GTCACTTAACCTTTCATAGCTTTAGTTTTCTCATCTGTAAAATGA
AAATAATAGTACACGTCTACCTTGCTGTGGTTGTAAAGTTAAGGA
AGGAGCATTCGGTATTGTTATATAACAGGTGGCTCTGCATTATTT
TATGTATAATGTAGCACGTTATTACATATTAATTAGTGTATTAGT
ACTGTATATACACAGTAGATACTATGGAGGTACCTGTTTTCATTG
TTACATCACTGTTTTTATTTCAAGTGATGGATTTGAGTTGGTCCG
TTGCTGTTTTAGTTGGTGTGTGATACACTTTTACTTTCTTTAAAA
AAAG

[0824] In some embodiments, the intronic domain that promotes trans-splicing primarily in the liver comprises or consists of sequences from the gene NCOR1. In some embodiments, the sequences from gene NCOR1 comprise or consist of:

(SEQ ID NO: 768)
GGCATGCCTCACTGCACCCAGCTAAATTTTTGTATTTTTGGTACA
AAGATACAAAATACCAGCCAGGCTGGTCTTGAACTCCCGACCTCA
GGTGATCTGCCTGCCTCGGCCTCCCAAAGTGATGGGATTACAGGC
ATGAGCCACTGCAATGCCTTAAGCATTATTCTTGAAGATAACTTT
GATTAAAAAATGATAAAATCAATTCAACCAATAACATGACAGAAA
TAAGCATTACATTACTTGTTAAGAGATGGCAATTATTACATTGGT
TGTTTGCATATTTCGATTTATTTTCTTCCTATAGGTATCCTGCAC
CCCATGTAACATACCAATTGGAACCCCAGTGAGCGGCTATGCTCT
CTACCAGCGACACATTAAAGCAATGCATGAGTCAGCACTCCTGGA
GGAGCAGCGGCAGAGACAAGAACAGATAGATTTGGAATGTAGAAG
TTCTACAAGTCCATGTGGCACATCCAAGAGTCCAAACAGAGAGTG
GGAA

[0825] In some embodiments, the intronic domain that promotes trans-splicing primarily in the liver comprises or consists of sequences from the gene UBB. In some embodiments, the sequences from gene UBB comprise or consist of:

(SEQ ID NO: 769)
TAAACTGCCTCTCGGGAGGTTGGGCGCGGCGAACTACTTTCAGCG
GCGCACGGAGACGGCGTCTACGTGAGGGGTGATAAGTGACGCAAC
ACTCGTTGCATAAATTTGCGCTCCGCCAGCCCGGAGCATTTAGGG
GCGGTTGGCTTTGTTGGGTGAGCTTGTTTGTGTCCCTGTGGGTGG
ACGTGGTTGGTGATTGGCAGGATCCTGGTATCCGCTAACAGGTAC
TGGCCCGCAGCCGTAACGACCTTGGGGGGGTGTGAGAGGGGGGAA
TGGGTGAGGTCAAGGTGGAGGCTTCTTGGGGTTGGGTGGGCCGCT
GAGGGGAGGGCGTGGGGGAGGGGAGGGCGAGGTGACGCGGCGCTG
GGCCTTTCCGGGACAGTGGGCCTTGTTGACCTGAGGGGGGCGAGG
GCGGTTGGCGCGCGCGCGCGTTGACGGAAACTAACGGACGCCTAA
CCGATCGGCGATTCTGTCGAGTTTACTTCGCGGGGAAGGCGGAAA
AGAG

[0826] In some embodiments, the intronic domain that promotes trans-splicing primarily in the liver comprises or consists of sequences from the gene UBB. In some embodiments, the sequences from gene UBB comprise or consist of:

(SEQ ID NO: 770)
GTTTGTGTGGTTTCTGGAAGCCTTTACTTTGGAATCCCAGTGTGA
GAAAGGTGCCCCTTCTTGTGTTTCAATGGGATTTTTATTTCGCGA
GTCTTGTGGGTTTGGTTTTGTTTTCAGTTTGCCTAACACCGTGCT
TAGGTTTGAGGCAGATTGGAGTTCGGTCGGGGGAGTTTGAATATC
CGGAACAGTTAGTGGGGAAAGCTGTGGACGCTTGGTAAGAGAGCG
CTCTGGATTTTCCGCTGTTGACGTTGAAACCTTGAATGACGAATT
TCGTATTAAGTGACTTAGCCTTGTAAAATTGAGGGGAGGCTTGCG
GAATATTAACGTATTTAAGGCATTTTGAAGGAATAGTTGCTAATT
TTGAAGAATATTAGGTGTAAAAGCAAGAAATACAATGATCCTGAG
GTGACACGCTTATGTTTTACTTTTAAACTAGGTCAAAATGCAGAT
CTTCGTGAAAACCCTTACCGGCAAGACCATCACCCTTGAGGTGGA
GCCC

[0827] In some embodiments, the intronic domain that promotes trans-splicing primarily in the liver comprises or consists of sequences from the gene LRRC75A-AS1. In some embodiments, the sequences from gene LRRC75A-AS1 comprise or consist of:

(SEQ ID NO: 771)
CCTGAGGTCAGGAGTTCAAGACCAGCCTGGCTGGCCGACATGGTG
AAACCCCATCTCTACCAAAAATACAAAAATTAGCCGGGTGTGGTG
GCGTGTACTTGTAATCCCAGCTACTTTGGGGGCTGAGCCAGGAGA
ATCGCTTGAACCCGGGAGGCGGAGGTTGTAGTGAGTCGAAATCGT
GCCACTGCACTCCAGCCTGGGCAACAGCGAGACTCCATCTCAAAA
AAAAAAAAAAAATTACAACCTACTGAGAAGCTAATTAAGATTTGT
AGTCCTCAATAATTTACAAAAACTTAGAAAAATTACCTCTAATTA
GGTCTTAAGGGGCTTTTGTTAGGATGGACTTAAATTTGTAAAGTC
ATTAATTGACTGTCATCAGAAATGCCTGTCCTGCTCTGCATCTGC
AGTCTCTAAGGTGTATGCGCCTTCTCCATTCCCCCAGGTTTTGAG
AACAGAGTGCTGTTTTAGAGCTGGCAGCAGCATCTCAGCCCAAGA
GAAG

[0828] In some embodiments, the intronic domain that promotes trans-splicing primarily in the liver comprises or consists of sequences from the gene LRRC75A-AS1. In some embodiments, the sequences from gene LRRC75A-AS1 comprise or consist of:

(SEQ ID NO: 772)
AAAAAAAGATATCAAATGATGAAATCACCCAAAATAGCTGGAATT
ACCGGCAGATTGTGTAGTGGTGAACCTATGGTTTTCTGAAGATAT
CTCTTACCCTGTGATTGACTGTCAGTTGGTGCAGAAAGTGAGATT
GAAATGTAGTTTCTTTGCAGGTTATATTCCCAGAGGATGTCAGTC
CCAAGGACCAGTAGCTGCCATCAGTTTGGATTCTGAAAACTAACT
GGCATCAACACTGGGTGTAGAAACATGCTTGCCTTATGTATCAGA
GGACATGCTCAGCAGATCCAAGAGATATATTTGGCAACTTTTTCT
AGAAAAGGCACATTGGGTATCATTCATTACATTCTTGAGTTTTTT
TGGGTTTTTTTTTTTTTTTTTGAGACAGTCTTGCTGTATTGCCCA
GGCTGGAGTGTGGTGGCACAATCACAGCTCATTGCATCCTCAATC
ACCCAGGCCTAAGCAATCCTCCCACCTTGTAGCTGGGACTACAGC
TCAC

[0829] In some embodiments, the intronic domain that promotes trans-splicing primarily in the liver comprises or consists of sequences from the gene SKAP1. In some embodiments, the sequences from gene SKAP1 comprise or consist of:

(SEQ ID NO: 773)
GTAAGGACAGAAAGTGTGGGGCTTAAATAGAAAGTCAATTTTTTC
ATTCTTGATTTAGTCACCATAAACAGAATTATTCCATGTCATACA
CTTCCCATGGCTCCCTCACAATATAAATTCCCATTTATTCATAAT
TGTTAGGAAAAGTTTTAAATGAAAATCCAGATTCAGGAACCATTT
TCACATTTAAAAATACAAGGCTAGGCCGGGCGTGGTGGCTCACGC
CTGCAATCCTAGCACTTTGGGAGGCCGAGGCTGGTGAACTGCCTC
AGCTCAGGAGTTCAAGACCAGCCTGGGCAACATGCTGAAACCCAG
TCTCTACTAAACTACAGAAAATTAACCAGGTGTGGTAGCACATGC
CTGTAGTCCCAGCTACTTGGGAGGCTGAGGCATGAGAATTGCTTG
AACCCGGGAGGCGGAGCTTGCAGTGAGCTAAGATCACGCCACTGC
ACTCCAGCCTGGCGATGGAGCAAGACTCCATCTCAAAAATAAATA
AATA

[0830] In some embodiments, the intronic domain that promotes trans-splicing primarily in the liver comprises or consists of sequences from the gene SKAP1. In some embodiments, the sequences from gene SKAP1 comprise or consist of:

(SEQ ID NO: 774)
CAAAGTTCCTATGGACAAAGAAGGCCGAAAAGTGAGCTGTGATCC
AGAAGCCTGCTGGCTGACTAAGCCTTTCTTGTAAATAGGCAGAAG
TCACAGATTTACTCTGATCCTTCAAATGCATAATGAAGAGAAAAA
CTAGATAGTTAGTTGCCCTGGATCAGGAAAGTCTGGCGGGAAACC
TCTGCACTGCTTACTTACAAACCAAGTGAAAAATTACCTGCCTGA
TTTTCTTTTATTAATAAATAAATATATTTATCATATTGTTGAACG
GCATCCTACTAGGAGTGATCTGTAAATATTTAATGTTAGTTAATG
ATCTCCTTCTCCCATAGTCCTTTGCTCATGCTGAGTGTTTGGCTG
TATCTCATCTCAACTCCCCTTAATCTGAGGTTTCCTAGGGGCAAT
ATCAGAACCCTGGTTTCCATTTGCAGCAAAAACATGGGTACCTCG
GAAAAAATAGAGTCCTTTTAACTTTGATTTCTCCTCTCTTTGATC
AGTA

[0831] In some embodiments, the intronic domain that promotes trans-splicing primarily in the liver comprises or consists of sequences from the gene TOM1L1. In some embodiments, the sequences from gene TOM1L1 comprise or consist of:

(SEQ ID NO: 775)
ATTCACCAACAGTTCAGTGATACTTGAATTCTGGTCTTCTTTCCC
AATCAGGCTGCTCCTATTATTCAGAGTCCTCAAATACTTGCTCTA
TGCATTCCGTCCACCTTTAAGTGACATTCAGTGGAGAGACAGAGT
GCAGTACGTTTGCTCCGCTTTATCCTGGACCGGAGACCTCACAGC
TTTCTTCTTAACCTGTGTTCTATACTACTTCTCATCCTTTAAGAA
ACGATGGGGTGGTAGCTACACTGATGGAAAGACTAAAGGCTCTGG
TCTTAGTGTTCCGTGCACACTCCACAGTCTCAGGGCTCCCACCAC
CCATGGCATCATAACCTGATGTGCACTAAAACCAATTGTTTTATA
AACAGTTATTACAAAATGACACTTTATGCAGTCTGAAGGTACCTT
TTAGGTTTTGTTTTTAGACTAGGAAAATTATCTTACTTTTTGCAT
TTGTGTTCTCACTGTAGGGTAATCATTCTGTGTTATCACACTATC
CTAG

[0832] In some embodiments, the intronic domain that promotes trans-splicing primarily in the liver comprises or consists of sequences from the gene TOM1L1. In some embodiments, the sequences from gene TOM1L1 comprise or consist of:

(SEQ ID NO: 776)
TAAGTAACAAAACTCTTTTCTAGCAGTGCATCTAGTCAGCAGATT
ATTGTAGCCAGAAAAGAACTCATGGTCATTAATTCCCATGTTCTG
CTCAGTATTGTGTTGATGCGCAGCCCCTGTTAGCAAGATGGTAAG
GATCAAAATTTTTTTGGAGTTTGTATTTGCTATCTCCACTTCCTT
TCCTTGTATTCTCTTTGACTTCAGACATGCTCTTCTACCACTCTA
TGGACATAACTCTTGTCAAGGTCACTGGTGACTTCTGTATTGTGA
AATTTAGAACTGCAGTTCCATAGTCCCTCATTTTATCAGCAACAA
ATGACAAAGTTGATCACTTCCTCCTTCTTGCACACATGGCTTTCA
GACACCAGTCACTTTGGTTCTTCTCCTGCCTCACGTTCATTTCTT
CTCCATCTCTTTTGGTGGCTCTTCCTCCTCTACTGACCTTTTCTT
GTTGGAGACCCCAGGGATCAGGCTTCAGACTTTTCTATCTACATT
CATT

[0833] In some embodiments, the intronic domain that promotes trans-splicing primarily in the liver comprises or consists of sequences from the gene ABCA6. In some embodiments, the sequences from gene ABCA6 comprise or consist of:

(SEQ ID NO: 777)
GTAAGTTGATACATTTATTACCACTTTCTCTGCTTTAGATCTTAG
CTATATGTAGCTAATATTAATGCCCTAGTAGGTTACTGCAATCAC
TACTTTCATGTCCATTGTGTGTGTGCATGTGTGTGTCCTTGTGTG
TACTTGAAATAGTTTCTATGGAGTGAAAAAGTTATGTAATCCAAA
TAAAATTTGACTTGCCTTTTGCATAAAGGTCTGAACTAATGAAAT
GATGTATCAAAAAGAAAAAACAATGCTGACTCTAAAATATCAAAG
TCTTTTCTGTATAATTATTGAGGTTATTTTTGAGGGGTGGACCCA
ATTTTTTTTCCCTTAAGGGTGCTCATCACATGGTAGCTGATCACA
ATATCTCTTCTCCCTCTAATATTCTGTCTCATACTTACTTCTCGT
TTCACTCCGCTCTGCCTTCTCTGAACAAGAACCTCTAATTTCCAT
CTTCCAGGTTGTTTTCTGCAGAAAGTATGTAGATGCTCCTTCTTA
CATT

[0834] In some embodiments, the intronic domain that promotes trans-splicing primarily in the liver comprises or consists of sequences from the gene ABCA6. In some embodiments, the sequences from gene ABCA6 comprise or consist of:

(SEQ ID NO: 778)
TCTGCCTTCTAGGTTCAAGCGATTTTTCTGCCTCAGCCTCCCGAG
TAGCTGGGACTACAGGCATGCACCACCATGCCTGGCTAATTTTTT
TGCATTTTTAGTAGAGACGGGTTTCACCATGTTGGTCGGGCTGGT
CTGGAACTCTTGACCTCAAATGATCTGCCCACCTCAGCCTCCCAA
AGTGCTGAAATTACAGGCATGAGCCACCGTGCCTGGCCTTGGCAT
CCTTTCTATTGGTTGGTGCCTATACCAGTGTTCAGCATCTATCAT
CTCTGTATGCATATATGGTAAAGGTAACGAAGATGAATGGCAATT
ATAAAGAAGGAGAATTGCGATTGAAAAAGGATATGCAATGAGCTT
CTGCTGTAGGATTAACAGTATAGTTATTAATCTAGAAGGTACAAG
GGTAGTCATTACATTGTTCTTTAGATGCTTTTGTATATATTAAAT
ATTTTGTAAATAAGTTAACATAATTTATATAACTTTTTGTCTTTA
TTTA

[0835] In some embodiments, the intronic domain that promotes trans-splicing primarily in the liver comprises or consists of sequences from the gene AFMID. In some embodiments, the sequences from gene AFMID comprise or consist of:

(SEQ ID NO: 779)
GCTTGGGAGGCTGAGGCAGGAGGATCGCTTGAGCCCAGGAGGTCG
AGGCTACAGTGATCCATGATCGCACCATTGCACTCCAGCCTGGGC
GACAGAGCGAGGCCCTATCGCTTAGAAAACAAAAAGTTACATGAA
GTTCCCCCAAGGTCCCGTAGCTAGCATGTGATGTGGCAGGGAGAG
AGCCTGTCCGCTTCACTCTCTCACATGGGACCAGAAAGGGGTGAT
GCTGTGCGTGGACAGGACATCTGGCAAGTGGTGTGTCCAGGACAC
AGGAAGCAGCGTAGTGGCCAAGCTGCCTCCAGCTGTCACATCTGT
GTGTCTCTGCAGTAAGGATGAGTCTGCCTTCATGGTCCACCCGCT
GACGGCACAGGGAGTGGCCGTGGTAATAGTGGCTTACGGCATCGC
CCCCAAAGGTAATAGGAGTGGTTGCTGCAGGTCCGAGGGCCGGTG
GGCTTTAGGAGGAAGTGCATCCCTGACCCAGCTCATGCTCTCTGT
GCAG

[0836] In some embodiments, the intronic domain that promotes trans-splicing primarily in the liver comprises or consists of sequences from the gene AFMID. In some embodiments, the sequences from gene AFMID comprise or consist of:

(SEQ ID NO: 780)
TGGGTGTTGCCAGTAGATTTTCTTCCTGTTGGACCTCAGTGGGTG
GGAGGACAGTGCAATCAGTACCTAGGATACAGCCAAGCTGCCCCT
CTGGCCTGTGGAGCAGAAAGCAAATTGGGACTCTTCGAAGGGGGC
CTGATGTTGTGGGGAAACTGCGTGCAAATCCAGCTCTCTGCTCTG
ACCCCTCCCAGGGGAATTTACCTGTGTGGACACTCAGCCGGGGCC
CACCTGGCTGCCATGATGCTCCTGGCCGACTGGACCAAGCATGGG
GTCACGCCCAACCTCAGAGGTTTCCATGGGAGCTACAGCCTGGCT
GGGCAACCTTCATCTCCCCATGAGCCTTGGGGTTTGGGCCAACTG
CTTGAAATCCTCCCGGCCATGAGTGGCTTGACCGCAGGGCTTCGA
GCCCTCTGAGCAAGGCCTTCTCTGCCTCCTCTGTGCCCCTTCCCC
TGGTCCTGCCCCTCTGGCGGTGGGGGTGGGCTGGCCCTGCCTTGC
TCCG

[0837] In some embodiments, the intronic domain that promotes trans-splicing primarily in the liver comprises or consists of sequences from the gene TTC39C. In some embodiments, the sequences from gene TTC39C comprise or consist of:

(SEQ ID NO: 781)
AAGAACTGTTGATCCCAAAAGGGAAAAATTAGACATAGGGTGTGA
CGTGTCTAGATACCTCCACCTGCGCTCATGCACACATTCCTGCGC
CATAAAGGATTGATTTTTTTTTTTTAACCTTGGTGTTTTGTGTTT
GAGCTGTGTGCTAACAGTCAGTGTCAATGTCTGCCTTCTGAGCTG
TGGGCGATTCCCATTGTTGTGAGGTTTCCTCCAACTGGACGTTAA
GTTACTGAGAACAGGAATCAGGGATGCGATTGGTGCGTGTCTTCT
GTGGCTACCTGGTCAGCATTCATAAACGGTGATAATGGATTGAAT
GCTGCAGTTTCAACCTTCCTGACAACAGAGGAGAGTGTTACTTTG
GGGCATGAACAGTTATTGATCCAGCTGGGCCTTGGTTAATGAGTC
ATTTGGCTTACAGTGTTCCCGAGTCACAGGCTGTCCTGAAGATCA
CCTGCTGACTCATTGGTGCCCTTGTTTCCCCGAGGCCTCCTGCAG
TGAC

[0838] In some embodiments, the intronic domain that promotes trans-splicing primarily in the liver comprises or consists of sequences from the gene TTC39C. In some embodiments, the sequences from gene TTC39C comprise or consist of:

(SEQ ID NO: 782)
TATGTGACATTTAGCATTTCTCAATGCCTAAGATTAAACTGATGC
TTTGAATCCTGATCATGCTTTTGAGCTGCTCCTCTTGGGTACTTG
TGGCATCGTGTTGGCAGACCCTGAGTGACATCTTCAGCGGCGGGA
AAACGAAATGTATTTCACTGGGAGTAAGTAGAGCGGACATTTGAG
AGTTTGCTGGGTCCCAGACAGTGTTATGTGAATGAAAGTGTTGGA
AATGTAATCTGGATCCTCAGGGAATTTCTGAAGTGTCGGGAGAGG
AGATTTGATGAGCAGAAGCAATTGGAGAACAGCATTCTAGGGTAT
AGAAGCAAACTATCAACTGTATGGTGAAGAGCTCACTGAGAACTG
GGCTAATGGAGCGGCTTCGTGCATTCACTCAGTAGCGATTGAGAG
ACTTCTGGGCCAGGGCTGGGCGCACACGGGGATGAAATATGGTCC
CTTCCCTTTCCACACCTGTGTGGTAACAAGGGGCTAGATTAGCAA
ACAA

[0839] In some embodiments, the intronic domain that promotes trans-splicing primarily in the liver comprises or consists of sequences from the gene MOCOS. In some embodiments, the sequences from gene MOCOS comprise or consist of:

(SEQ ID NO: 783)
GTTCAGTACTGAAGACCTAAACATTTGTCACAAGGGCAGTACCAT
CCACTATTTACACACATTTAAAATTATTAATGTGAGGTCCAGGTT
TGCCAGTTATAACAAACTTGTTTTCTTAAAAGTGAGTTAGTGGTG
CCAGGCGTGGTGGCTCATGCCTGTAATCCCAGCACTTTGGGAGGC
TGAGGCAGGTGGATTACTTGAGCCCAGGAGCTCAAGACAAGCCTG
GGCAACATGGTGAAACTCCATCTCTGCAAAAAATACAAAAATTAG
TCAGGCATGGTGGTGAATGCCTGTCGTCCCAGCTACTTGGGAGGC
TGAGGTGAGAGGATCACCTGAGCCCAGGAGGTTGAGGCTGCAGTG
AGCTGTGATCATACCACTGCACTCCAGCCTGGGTGACAGAGTGAG
TGAGACCGTGTCTCAAAAAAAAAAAAAAAAAAAAGAGTGAATTGA
GAATTTACATAAAGCTCATGATTCTCTTGTGTTTCATGATTGATT
TGAG

[0840] In some embodiments, the intronic domain that promotes trans-splicing primarily in the liver comprises or consists of sequences from the gene MOCOS. In some embodiments, the sequences from gene MOCOS comprise or consist of:

(SEQ ID NO: 784)
TGGGTTTTCTTTCCATCCTGCTGACTTTATTACAACTCATCCTAGT
TCCAGACGAGAGCAATGTAGTGTGACAAAGTCCATGCACTGTTGA
AGAGGCCACCAGGCCCTCAGCCACATGCCTTTCCACCTTCATTCA
CCCTCGTTTTTCAGTCCTCTTTACTCAGCCAAAAGTGGTAACTTT
CAAATGGGAAGAAAGAGGCCAGTTCTTCTGATGGCAGGTGGGAAA
CTGTTGGGTCTTTGCCATAGTAGAATAAGCTGTTCACTTCACTTC
CTGGTCCACTAAAATGTCCAGAGTTGCACTGAGCACTCAGGCATG
GTGGTAGGTGGTTATCAGACGGGGTGTCACAGATGGACAACAGGA
ACCAAATGTTACTCCCAGAGCAGCACTGTGGGGAATGGATTCAAT
CGTTGGGTGTTTGGAAGACGGTGCTGGTTTTTCCTTGAAAGCACA
TCTGCATCCCCATTTTTATTTATTTTTTTGAGGTGGGGTCTCGCT
CTT

[0841] In some embodiments, the intronic domain that promotes trans-splicing primarily in the liver comprises or consists of sequences from the gene PET100. In some embodiments, the sequences from gene PET100 comprise or consist of:

(SEQ ID NO: 785)
CTAATGTCTGCCTCCCATAAGCCGACCCTGCCCTGATGTGGGGCT
CTGGAGGCCTTTGGCTCGTGTCCCATTTGTGACTTTTCCTTACAG
AGGGAGCTGTGGCCACCTGAGAAGGTAAGTGATCTCTTCTTCCTG
CCAGAGGGATGGAGGAGGCTGGATTCTTGTATCCGGGATGGGTTT
TAGATGAAAATTTTAGGCCAGGCGCAGTGGCTCATGCTTGTAATC
CCAGGGCATGGGAGGCTGAGGTGGGTAGATCACTTGAGGTCAGGA
GTTCAAAACCAGCCTGGCCAACATGGCGAAACCCCATGTCTACAG
AAATACAAAACTTAGCCAGGCATGGTGGCAGGCGCCTATAATTCC
AGCTGCTTGGGAGGCTGAGGGAGAAGAATCACTTGAACCCAGGAG
GTGGAGGTTGCAGTGAGCCCAAGATCACGCCACTGCACTCCAGCC
TGGGCAATAGAGTGAGACTTTGTCTCAAAAAGAAACATTTTACTC
TCAG

[0842] In some embodiments, the intronic domain that promotes trans-splicing primarily in the liver comprises or consists of sequences from the gene PET100. In some embodiments, the sequences from gene PET100 comprise or consist of:

(SEQ ID NO: 786)
TAATTGGCAGGGGGCTTCCAGTGAAGACACTGAACCCTGAAGCCG
TGGTCTGGGGCAGGGTGGTGGGAGAGGTGGGCGGGGGGGGGTGGT
CCCGGCTCTGAGGTGTGTGCCCCTCCCCCCTTCCTGTCCCACCCG
CTTCTCCACCCCTAGCTTCAAGAGATAGAGGAATTCAAAGAGAGG
TTACGGAAGCGGCGGGAGGAGAAGCTCCTTCGCGACGCCCAGCAG
AACTCCTGAGGCCTCCAAGTGGGAGTCCTAGCCCCTCCCCTGATG
AAATATACATATACTCAGTTCCTTGTTATTCATTTAAGTGTTTTA
TTCTTTTATCAGTTTTTGGGGGCCGAGTGAGACCCAGGATGCCTC
AGGCCCTCAGGGGGCTTGTGTCGGGGGCTGGGGGCTGCTGTTCCG
ACGGAAGCCGAGAGCGGTCGGGTCCTGAGGGGTGAGCAGGGGTTG
GGGACTGAGGGTCCCAGCTCGTTTCTGTGCTCCGTCCTGTGGATG
AAGA

[0843] In some embodiments, the intronic domain that promotes trans-splicing primarily in the liver comprises or consists of sequences from the gene PRKACA. In some embodiments, the sequences from gene PRKACA comprise or consist of:

(SEQ ID NO: 787)
GTGAGGCTGAGTCCTGTTACTATAGCAACTTCCTAGGCACACTCTGCCC
CTTAAGTCAGGGAGGGGCTGCAGCGGGGTCTGGGGCACAGGCGAAGAGA
AGAAGGATGTGAACCCCTGGCTGGCCCTGGAAACGCCTCCTGTACAGCC
CCGGGCTGTGCGGCCTGGGGAAGAGAGAGGGGATCGGTGGCCCAGTTCA
GACAAGGGAGGATGGTCCACCCGGCAGGGGGCCAGCTCAGAGAGGGGTG
GTGGAGTGGTCCATCCCAGTGTTGGGGTTCAGCTCAGACTGTAGGATGA
GCCATCCCAGTGTTGGGGTCCAGCTCAGAATGGGGGTCGTTCCAGCCAG
TGTTGGGGTCCAGCTCAGAGTTGTGTCATTTAGGTAAGCCCAGAGCAGG
GAATCCAGGCTCCACTGGAGGAATCAGCCAGCCTCGAGTAGGGGGCCCA
GCCCAGGCTGGGCATTCCTGCCCCAGAATTCCCAGGACAGCCAGATTTC
AAAAGGGCA

[0844] In some embodiments, the intronic domain that promotes trans-splicing primarily in the liver comprises or consists of sequences from the gene PRKACA. In some embodiments, the sequences from gene PRKACA comprise or consist of:

(SEQ ID NO: 788)
CAGCGGCCCCAGGGGGCAGGCGCCCAGGTCAGACAGCCAAGTGGGGCTC
AGGTCGTGGCTGGCACTGGCTGAAGATACCCCTGGGAGCTGGCCCACAG
GGGAAGGGGCAGAGCTAGTAAAAGGGAGCCCCCGATCCCCAGGACACAA
GCAGATCCTGGCAAAGAGAGAAAAGCACCCCCCAAGAAGACCCTAGATG
GGAAGAACTAGTGCCGTGTAACATCCTATGGATGCCTAAGACGGCCAAA
CACCTTCTGTGCCTTGGCAGTTGTATGGGTGCCCAAGAGGTCTTATCAA
GGCAGCTCTCCCCTTAGCGCAACCGCGTCTACAGAAACTCGGAGGGCCC
TATCTGTCCCTCCTCCACACCCAGTGGCCTCTGGGTTGGGTTTCTCTTC
CTGCTCCCACCCCACGGCTCCCTAGCTCCCCCTGCAGGCAGGGTTCTGG
GGACAGACAGCCGAACAGACACGGCAGGTCTCATGAGCCTTCCCAGCCA
CCGTAGTGC

[0845] In some embodiments, the intronic domain that promotes trans-splicing primarily in the liver comprises or consists of sequences from the gene SLC27A5. In some embodiments, the sequences from gene SLC27A5 comprise or consist of:

(SEQ ID NO: 789)
GTCCGAGGCAGGGTTTCTCGGGGCGGGGCTGGCGCGGGGCCACGGACGC
TTTCAGATCCTAGAGGGAGTCAGGCTGAAGAGGCGGGACTTTCCTGTCG
TAAGAGGGCGGAACTTGGAGTCAGGACTTCTCACGCGAAGGCGGGGCTT
CTCGATTTTCGAGGGGGCGGGGCTGACTGGGCCTCCTGATCCCCAAAAG
GGGCGGGGCGGGGGCAAGAGGCGGGGCCTCTCCTTCCCGGGGGCGTGGT
CACAAGCGCCGGCTCCCTCCTTGCAGATGGAAGGGCGAGAACGTGTCCA
CGCACGAGGTGGAGGGCGTGTTGTCGCAGGTGGACTTCTTGCAACAGGT
TAACGTGTATGGCGTGTGCGTGCCAGGTGCGGAGGGTTCTCATTTTAAA
CTTCCAACAGCTTTGTGGGTGGAGGGGTCGTTATTCTGATTTTACAGGT
GGGGAAGTGCTAGGGCCCAGAGAGGTTTAGAGACTTGCTGGCTCTCACA
GCCAGTGAG

[0846] In some embodiments, the intronic domain that promotes trans-splicing primarily in the liver comprises or consists of sequences from the gene SLC27A5. In some embodiments, the sequences from gene SLC27A5 comprise or consist of:

(SEQ ID NO: 790)
TTACCACCATCTGGGGCCTCCGCCTCAGCTTCTCGGCTCTGTCCAGCTC
CCCTGCCTTGATCTCTTGCTCTGATTTACTGGGTCTCTGGGTGTCCATC
TGATTTGTTCTCTTGAGCTTTCTGTGGAAGACGGCATTCCAGCCATTGG
TCCCTTGTCCTGTACCTTCTGTTAGTGTCTTCTCCCAGGGCCTTGCAAG
GTCCTGGTCATATCTATTCTCACTGCCATTTGTCTGTCCGTCTTCCATC
CCTTGTTATCCTTTTCCTGTTTCTCATGGGCTCCCCATACCGCCTTCTC
TATACTTCTCTCTCATTTTCTGTGTCGCTTGTCGCAGTCTCTCAAGGTC
TCTGAATGTCTCTCTCATCTCTGGATCTCCCTGTCTGTGTCTTTGGGTC
TGTCCTTGGCAGGGTGCTGGGTGATGAAGAGTCCACCGTTGTTGAAAAC
CTCCAGCAGGGGGCTTGGCTGGTGGGCTCCAGGGGTTCTTGTTCCTGCT
CCTACCCCA

[0847] In some embodiments, the intronic domain that promotes trans-splicing primarily in the liver comprises or consists of sequences from the gene ACSS2. In some embodiments, the sequences from gene ACSS2 comprise or consist of:

(SEQ ID NO: 791)
CACTTGATGAGGTCTGCACCTTCTCAGTGATGTCCACTCCCACAGTGTA
GTTGGCAGCTCCTCACTGGAGTTTGAGTCCTCTGGTAGGGTCCACGTCT
CCTTAGTAAAGTCTATATCCTCTGTATCTCTTAGGGGAAATCCATGTCT
CCTCACTAGGGTAAGTGCCCTTCAAAGCCATTCATGTCCTATTAGCAGG
GCCCAGGGCCCTTCAGTCAGATCTGAGAACCCCCAGCAACATCTGTGCT
CCCTTAGTGGAGTCCATGTACTGTCAGTGAAGTGTGTGTCCCTTCGGTG
CAGTGAATATCTCCTTTATGAAAGTATCTGACCCCTTGGTGGGGTCTAT
GTCCACCCCAAGAGGTCTGTACTCCTTCAGTGGGCCCTCAGATTCCCGC
CCTCCTTGGGATTGGGCAGACTCTCGGTCTCCCATAGAGAGATTTTTTT
TCAGCTTAGGGTGTGCAAGGTTTACAGTCAGCTGGGCAAAGTGCAGGGA
AGTAGCTGG

[0848] In some embodiments, the intronic domain that promotes trans-splicing primarily in the liver comprises or consists of sequences from the gene ACSS2. In some embodiments, the sequences from gene ACSS2 comprise or consist of:

(SEQ ID NO: 792)
TGAGAGATGGAGGAGGGTCCTGCCTGACTTCTTTCTGGGGTGGAGGGGC
TAGAGAGAAGCTAGAGGTAATTAAGCCCAGGTTGTGGTGGTGGTGGTGG
GGGTTTCCCTTGGTGGAGTAAAGAGATTGTGAAGGAAAGAAGAGAATGT
GGGCCAGGTGTGGTGGCTCACGCCTGTAATCCTAGCACTTTGGGAGCCC
AAGGCGGGCAGATCACCTGAGGTCAGGAGTTCAAGACCAGCCTGGACAA
CATGGTGAAATCCCATCTCTACTAAAAATACAAAAATTAGCTGGGTGTG
GTGGTGTGCACCTGTAATTCCAGCTACTCGGGAGGCTGAGGCAGGAGAA
TTGCTTGAATCCAGGAGGCAGAGGTTGCAGTCAGCCGAGATTGTGCCAT
TGCACTCCAGCCTGGGCGACAGAGCGAGAGACTCCATCTCAAAACAAAA
ACAACAACAAAAAAAGAGAATGTGAATGATTTTTCCTATTTGCACAGAC
TTTGATATT

[0849] In some embodiments, the intronic domain that promotes trans-splicing primarily in the liver comprises or consists of sequences from the gene LBP. In some embodiments, the sequences from gene LBP comprise or consist of:

(SEQ ID NO: 793)
CCAAGGCAGAAAATCGCTTGAGCTCAGGAGTTCAAGACCAGCCTGGGCA
ACGTGGTAAAACCTGTCTCCACAAAAAAATACAAAAATTAGCCAGGCAT
GATGGCACATGCCTGTAGTCTCAGCTACTTCAGGGGCTGAGTTGGGAGG
ATGGCTTCAGGCCAGGCGACAGAGGTTGCAGTGAGCTGAGATTGTGCCA
CTGCACTCCAGCCTGGGTGACAAGGTGAGATCCTGTCCCCCACCCCCCC
GCAAAAGAAAAGAAAAATGTGGATTCTCAAGCCGCTTCCCCAAATCTGC
TGAATGTGATCATGCGATTGGGTGCCGCAGGCACTGGGAAGCCAGACAC
ACCGAATCAGGCTGGATGTGCTGGGACACAGCAGGGCGCCGGGAAGGGG
TGGAGAGGGCTCCCTTTGTGGACTGGCCTGACCAGGGACCAGGGCCTGG
CTTTCCCAGGCACCCGGCCATCCCCAAGTTCAGTGGCAGACTGTGCTTC
TCTCCCCAG

[0850] In some embodiments, the intronic domain that promotes trans-splicing primarily in the liver comprises or consists of sequences from the gene LBP. In some embodiments, the sequences from gene LBP comprise or consist of:

(SEQ ID NO: 794)
TAAGAAGGTCCAAGCCTCTGGCCTCCCCCGAGCTTGGCGAGGGCTGAAT
GGAAGACCTCACTGACCAATGGCCCTGGACCAGGCCATGGGGGCTGGTT
TAGACGTACTTGGGCCCAAAGCCCAGGGAGGACAAATCATTTGCCCAGG
TCATGGAGCTGTTGTGGGGCACGCTGGGGACAAAGCTCCAAGTCCGTTC
GGTTGGGCAGAAAATGGTCAACTGCTTGACCAAGGGTTAAACAGCAGGG
GCTAAACAGAGACTCCAGCCCCTCCCTCTGCTCCACCTTGCTCAGTGCC
CCACACTGCCCTGCATTCCACCAAGGTCCGAAAGGAAACCATTCCTCAG
GCGCCTGCAAGAGACCAGGCAGGAAAGCTCAGCGAGGGCGTGGGCCAGG
TGGGAACTGGGCGAGCTCATGAGCACCAGCCCTGGATGGGGAGGCAGCA
ACACTGTCAGACTGGCCTGTTAAAAAGGAGTATGTGAAATCTTCAGAGT
GTATCATCT

[0851] In some embodiments, the intronic domain that promotes trans-splicing primarily in the liver comprises or consists of sequences from the gene PABPC1L. In some embodiments, the sequences from gene PABPC1L comprise or consist of:

(SEQ ID NO: 795)
AATCCCTCCATGCCAAGGTAAGCAGGAGCCTGGGCAGCAGGGAGCCCGA
GGGGGCAGGAGGAGAGCTAACGACAAGGGCTCTCCTAGTGGAGCCAGTG
GATAGCTGTTTGGCCAGATAAAGTGTTTCTTCTTGCTAATACCTGAAGG
CCTGCTGAATCTTAAGAGTGGAAGGGGCCTTAGGTAAGGGTTTGCTACT
TCAGCCCTTCCGTAGACTAATTCTGTGTTGTTCTGTAGGTAGGTCTTTT
GGTACAAGGAAGTGTGTTGTGACTCAGTGTAAGGGTTAAGATTTTTCCA
GCTGTCCAGCAATGTACCTCTGTGTCAAAGGTGACAGACAGGGCCATGG
GATCTTGCAAGCAGTGGTGGATGGGAGGGTTCCACAGAAACCCTGTGGA
TGGAGGAGGATCCTGTATCCAGGATGGTGAGCGAGGGGGAGATCAAGGC
TCTTCTGTGACCTGCTAAGATAGCTGCACTAAGCCCCCCCGCCACTCAT
GTCTCACAG

[0852] In some embodiments, the intronic domain that promotes trans-splicing primarily in the liver comprises or consists of sequences from the gene PABPC1L. In some embodiments, the sequences from gene PABPC1L comprise or consist of:

(SEQ ID NO: 796)
TGGGTGGAATGGTGACAGAAGCAGCTGAGCCCGGGAGAAGCTGTAAGGA
AATAGGCAGGGACTGACTTTCACAAACACTGAGAATTGCGCCGTGTTCC
TGGCTTTCTCTGAAGCACCAAAGAGTTTGGAGGAAGTTGTGAGAATCAG
AGGAGATGATTAACTGTGATCGGAATGGGGGGTGGTGGAGGGTGAAGGA
GGTGCCCTCTTGCCAGCTGCCCTGCCTGGCTTCATGCAGAATAGTTTGG
GCTTTCCCAGGGCCCTGCCTGGCTCCATTCTGCCTGCCTGAAGGCCTGG
CCAGGATGTAACCACCTTCTTTATTGAAGACTGGGTGTCTGCCATACTT
TAAAAACACTTATTTTTACCTTTTTGTCCTCAGAAAAGGAAATCCTCGC
TTCCATGGCTGCCAAAAGGACAGTGTTTCTGGCTCTCAGCCCTAAGGCC
CTGCAAACTCTAACTTATTTCCCAATTAGTCTGTATCTATACTTGGGCT
CTGTATGTG

[0853] In some embodiments, the intronic domain that promotes trans-splicing primarily in the liver comprises or consists of sequences from the gene UBE2V1. In some embodiments, the sequences from gene UBE2V1 comprise or consist of:

(SEQ ID NO: 797)
GTATGCTTGCAGGTTTTGCTGTTTCCTTTCAAATACCATATGTAGTACT
ATTTAATATTTTTCTTGTAATCAACTGACTCTTTTGCTTACATTTATTT
TAAAGGAAACTTTTACCATTATTATAAATGGGAAGTTAGTATATTACTT
ACCCTAAATAAGTTATTCTTAAACATAAATACGTGACTGTAAAACGAAG
TGTTCAATCACATACCACCGAAAGTCCTCTAACATACCACTACCAACTC
TGTCCTTCAGTTGCTTGGACCAAAAACCTGGGAGCTGTAGTTGACTCTT
GTCTCTCACACCTCACAGGCAACCTGATAGCAAATCTCCACAGCTCAGA
CCTCTGAAATGCCTAGAATTACGCCACTCCTCACTACTTTCCTGCTATC
ACCCTGGTCCAAACGGGTATTATCTTTTGCTAGGATTATTGCAGTAGCC
TCCTAGCTGCTTCTGCCCTTGCTCCCTTCACTCTCATCCTCACACAGCA
GTCTGAGGG

[0854] In some embodiments, the intronic domain that promotes trans-splicing primarily in the liver comprises or consists of sequences from the gene UBE2V1. In some embodiments, the sequences from gene UBE2V1 comprise or consist of:

(SEQ ID NO: 798)
AACAGCTGTTAACATCTTGTTCTGTATCCTTACCAACTCTATAAAGCTC
CTTAAGATGTCACTTATCATCTATATGAGTTTGCTAGTGCTGTCATAAC
AAAATACCATAGACTGGGTGGGGCTTAAACAACAAATTTCTCACAGCTC
TAGAGACCAGAAGCCCAAGATCAAGGTGTCAGCAGGTTTTGTCACATTC
TGAGGTACTGGGAGTTAGGACTTAAGTATATAAATTTGAGGGGAACACA
GTTCAGCCCAGCCCATAGCACGATCTGTGAACAAGTACCTCAGTCATCA
GCCTTCCTATCAATATGATTCTTTTGATGTTCATTTTTATTAGTGCAGG
CTTGTAAATTAACCAGTAGTAATGTAGTGACTTTTCCCCCGCTAGCCTA
ATTAGGATTATTAAAGATTTAGATTGAACCCTTTCTGAACAATAGTTGT
GTTGTCTGGCTTTTTGCCTATAATGTCACCACTATCTTTCAGTTTTATG
TTTGCTACA

[0855] Intronic domains that promote trans-splicing primarily in heart tissue

[0856] In some embodiments of the compositions of the disclosure, there may be an intronic domain that promotes trans-splicing primarily in heart tissue.

[0857] In some embodiments of the compositions of the disclosure, the intronic domain is derived or isolated from human genes that feature exons that are primarily included in heart tissue during the process of RNA splicing.

[0858] In some embodiments, the intronic domain that promotes trans-splicing primarily in the heart comprises or consists of sequences from the gene MASP2. In some embodiments, the sequences from gene MASP2 comprise or consist of:

(SEQ ID NO: 799)
GTGAGTTAAAACAAAGTACACCACGATCAATGACGATTGCTTTGAAATG
TAAACATATTTCTATCTGCAGATATGTGAAAGGAAAGTGAGAAAATCGT
GTGTCAGCATGATTTCTTTTGTCTATCTTTAAATGATAAAAAGCCAAGA
AATAAGTTTTCAGAGGACAAAAAGGATGGCTATGGAAAATGTGATTCTG
AATCCCGCCCTTTTTTCTTTCTTTCTTTATACTTAACTTTAAATTTACA
TAAGCGAGCCCTTTGTTTTAAAGCTAGTTTGGAAAGCTGGTGATTAAAA
TGGGCAACTTGGCCAGGCGCGGTGGCTCACACCTGTATTCCCAGCACTT
TGGGAGGCAGAGGCAGGCAGATCACTTGAGGCCAGGAGTTCAAGACCAG
CCTGGCCAACGTGGTGAAACCCCGTCTCCACTAAAAATACAAAAATTAG
ATGAGGTAGTAGCCCCGTCTCCACTAAAAATACAAAAATTATTAGGTGG
CGGGCGCCT

[0859] In some embodiments, the intronic domain that promotes trans-splicing primarily in the heart comprises or consists of sequences from the gene MASP2. In some embodiments, the sequences from gene MASP2 comprise or consist of:

(SEQ ID NO: 800)
TTCACAACAGCCCTGGGGCAACTATTATCGTCAACCGCCCCCCATCTTG
CAGATGAAGAAACTGAGACTCAGAGAGGTTACACATAACCATGGGGAAA
TGGAGAGCTAGGATTTAAACACAGCTCCAGTCCCATGCAAGTCCCAAAG
CCTCCCCTGAGCTCTTTTCCTCGGAGTTACACTCTCTCTTGGTTTTGAG
CCATGGCTCTGAAGTTCCTGGCATGGAGCAGATGTTCTATTTGTGGGGA
CTGCACCATCTTCCCACATAACCCAGCTTTCTCACATACCTTTTGCTCA
GTCCCAGGGAAAACAAGAAACCTTAATTTGCAAAAGCACCTGAGAGTTT
AATCTTGCCTTTGGTTTTAAAGAACCCTACCCCACGTATGGTGAGCTCT
CTTTACATGTTAAGTATTCTTTATAAACTAAGAACTTCAGATGGCTCGA
TTCAGTCTTGGCTGCTGTAGACCACATGAAAACCAACAAGCCTGGTTTC
CTCTGCGCA

[0860] In some embodiments, the intronic domain that promotes trans-splicing primarily in the heart comprises or consists of sequences from the gene AGMAT. In some embodiments, the sequences from gene AGMAT comprise or consist of:

(SEQ ID NO: 801)
GTAAGGAGATTCCACCAGTGAAGATCCTGGGGGTGGAGACACTTAACAC
CCATTTTCCTGGGACTTGAAGCGAATCTTTAGGAATCAGGATAGGATTT
TTGTTTGTTTGTTTGAGACGGAGTCTCACTCTGTCGCCCAGGCTGGAGT
GCAGTGGTGCGATCTCGGCTCACTGCAACCTCCGCCTCCCAGGTTCAAG
CGATTCTCCTGCCTCAGCCTCCTGAGTAGCTGAGATTACAGGCACATGC
CACTACGCCCGGCTAATTTTTGTATTTTTAGTAGAGATGGGGTTTCACC
ATGTTGGTCAGGCTGGTCTTGAACTCCTGATCTCGTGATCCACTCACCT
CGGCTTCCCAAAGTGCTGGGATTACGGGTGTCAGCCACCGCGCCTGGCT
GCCAAGGTAGGATTTTAAGAGCAGAGCACCTAGGCCTTTTCTGTTCTCT
GGGCTGAGGATAAGTTTGAATACCCTCTTACTGAAGGGTGATTGATTTT
GGCAAGGGC

[0861] In some embodiments, the intronic domain that promotes trans-splicing primarily in the heart comprises or consists of sequences from the gene AGMAT. In some embodiments, the sequences from gene AGMAT comprise or consist of:

(SEQ ID NO: 802)
TGAGATCGCGCCACTGCACTCTAGCCTAGGTGACAAAGTGAGACTCCAT
CTCAAAAGAAAAAAAAAAGAGGGGAGGAAGTCCGGACCCAAGATGAGTT
GCCACCTTCTTAGTTCTGGTCCTCGTACCCTCTAGGCAGAATGGCTCTC
AGATAGACGTGTATGACAAGACCCCAATGGAACAGACCCAAATCCCTTG
CTTTTAGAGCGTGCCAAGGCCAGTCTTCTGGACAGAGCAATTCAAAAGG
TGCTAGCGTGAGCTGCTGTTTCCCACTCTTGCTTTAGCAAAGCTTCTCT
CTGATTCCAACTCCATCAGTCAGCTTTGACCCTGCTTCCTTACCACTCA
TTGTCCCTCCCTTCCTCACCTGTAAAATAGGATAGTTCCCTCTTCATGG
AGATGGAGGGTCAAGTGTCATGTGCACACAGAGCTGAGCATGGGGCTGG
CAAACAGGAAATGCCCTGTAAATGCTGCCAGACAGAAACCTCAGTCCCT
GTCTCTGCA

[0862] In some embodiments, the intronic domain that promotes trans-splicing primarily in the heart comprises or consists of sequences from the gene MFSD2A. In some embodiments, the sequences from gene MFSD2A comprise or consist of:

(SEQ ID NO: 803)
GCTTCCGCAATGAATTCCAGAATCTACTCCTGGCCATCATGGTGAGTGG
GACCTGAGCAGGGGCGGGCAGCCTGGGCTGAGGTGACATAGGCTGTGGA
ATGGTTCTTGGAATAGGCAGAGGATGTTTCTCAGGCTGGCCCAAGGTCA
TGAAAGGATGAGGGAGGCTTCTCAGGGTATTTGGTTGGACCTTGCGAAG
GTAGGACTGTGAAAGAAAGAGTTTGAGGTTAGATGTTTGAGTAGTGAGC
ACAGCAAAAGCAAGGGCGAGGACACCAGGAACTTGGCTCAGAGGTTTGA
GAGGGCAGCAGACAAGGTGGGCCTGGACCAGCTCTGAGCTCCCCTGGGG
AGCCGTCAAAGGTGCCTGTCATCTTCGTTGCTGCCCACATGATGTCATC
TGGCTGCTCTTGGGCAGGGCTGGGAGCCACTTTGGGGTTCTGGGAAGGG
CAGGAGGGGCTCTGTGGCTCTAAAGCACCTCCCTTTAACCCCCTTTGTC
CATCCACAG

[0863] In some embodiments, the intronic domain that promotes trans-splicing primarily in the heart comprises or consists of sequences from the gene MFSD2A. In some embodiments, the sequences from gene MFSD2A comprise or consist of:

(SEQ ID NO: 804)
TGAGTGGGGTTGAAGAGCAGAGCCTGGGTTGAGTTGGGATGTCTGGTGG
GAACCTCCCAGCTGATTCATCTTCCTGCACCCCCTTCCCTAGTCAGCAG
TGCCATTTCTCATCTTGGTGGCCCTCATGGAGAGTAACCTCATCATTAC
ATATGCGGTAGCTGTGGCAGCTGGCATCAGTGTGGCAGCTGCCTTCTTA
CTACCCTGGTAGGTATATACAGGCCCCCCTCCTCGGGTATCTCCAGCCC
CTAGTCCCCAGTTTTGAAGCTCCTTAGGGAGAGTTCTATGCAGTGTTCT
CCCACAGGCCATTCTGTGGGTCCAGGTTAGGAGTGGGGGAGGTCTGTCC
TGTACAGTTGTACAGGTAGTGAGCTTTGCAAGAACACCTAGTCAGAGTG
AAAAATGGGGGCTGTAATCTGGCCTGGGCTCCACTTGCCACGCTGAGCA
CCTCCAGGCAGGGTTACTTCCTCTTAGAGCAAGAGGCCTTTTCTTATTC
ATGTGAAGG

[0864] In some embodiments, the intronic domain that promotes trans-splicing primarily in the heart comprises or consists of sequences from the gene EBNA1BP2. In some embodiments, the sequences from gene EBNA1BP2 comprise or consist of:

(SEQ ID NO: 805)
GAAGCGGAAGTCCCAATCAAAAGTTGAGCAGTAGCTGTGAGTTGCTGGC
GCTGGAGCGATTCGGTGGCACGTGGAGCCACGGCGTGGGAGTAGGGGGC
TGAAGGCAGGCAGCAGCGGCCAGGGCCGCCCTCTGCTAGCCGCTTGGGT
CTCGGGATACCCCGTTTCTTCCTGTAGGTGTGGGACGTGCGTGCGGCGA
GATGGACACTCCCCCGCTCTCGGATTCGGAGTCGGAATCCGATGAATCC
CTTGTCACAGACAGAGAGGTAGGTGTCAGCCGAGCTCGTGGGGCTGGGC
GTGGGAGAGGGGGCCTTACACCCCTGGGAGTGACCGTGATTGTGTCCTG
CAGTTGCAGGATGCGTTTTCCCGAGGGCTTCTGAAGCCAGGCCTCAATG
TCGTGCTAGAGGGGCCGAAGAAGGCCGTGAACGACGTGGTGAGCGTGGG
CACAGGGTCGGGGGTACTCGGACATGGGATGCGCTTCAGGCGCTGTTGG
GCTTGGGAG

[0865] In some embodiments, the intronic domain that promotes trans-splicing primarily in the heart comprises or consists of sequences from the gene EBNA1BP2. In some embodiments, the sequences from gene EBNA1BP2 comprise or consist of:

(SEQ ID NO: 806)
AGTTTCATAATACAAGTCGCCATTTATTTCCTCTACATTTATAATACTG
CATATATATTCAAATTGGCCAAAATCTTTCTTTCCAATCATCATGCTGG
GATTATGGGGTTATATGTGGCACATACCATTCCTGTATATGTCAGGATG
GAAAAAGTTTTACCTGGAATGAATTTTTGCCATTTCTGATCCACATTGT
ACTTCACACAGTGATTTCCTGAAGGAAATATAATGATCTGTTCATCGAA
GTAGAAGATATTGTTGGCCACGTGGGATCGAAGACCAAAAACATGCAGC
GTCTGAGCTACCACGGCTGACATGATCTCCCGCCAAACAGTTCTGCTGA
AGACCAAGGCAGCGCTTCAGAGTGGAGAGCACCGCCCCGCTCCGACCCC
GCCCCCGGCCCGGACTCGCCCTCCCCGCCCTTTGCTCCTCCCCTTGTCT
CTCCCCTTTCTCCTCCCCTTGTCCCTCCCCTTTCCCCTCCCCTTGTCCC
TCCCCTTTC

[0866] In some embodiments, the intronic domain that promotes trans-splicing primarily in the heart comprises or consists of sequences from the gene PRDX1. In some embodiments, the sequences from gene PRDX1 comprise or consist of:

(SEQ ID NO: 807)
GTGAGTGAGACTCCGTCTCAAAAAAATGTGGAATAGAACAAACTTTAGT
TTTAGGAACTAGACTTTATATTGTAGATCTAGTTGCAATTGACACGTCC
TTGTTTTATGGGAGGCTACATACTTTAAAGGTTTCCAGGGGAGCAAATA
ATTAATTATGATTTTGTGTATGTGTGTTTGTGGGGGGTAGTCATCAGGA
AATGTCTGAGGCCTTTTGCCTTACCGTGTGGGTCTGGCTAATGTGTAAT
GTTTTGACTCAAGATTGTAAAGTCAAATTATTCATCCGGGGAGAGGATG
GTCGTGTAACTGAATCAGCCTCCCAAGATGAACTTTCCCTCTGGCGTAA
GTTTAGGAGTCCTGATATTTTATTTTCCTTTACAACAGAAAGCAGCAAC
CCTGTAATTAAAGAGAACAATGAAGGAAGCTATCTAAGCCATGAGGGTT
ACTGAGGATCTGCGCTGGGGTTAAGGCTGCGAACTTAAGAAATATTTGG
ATAGACAGT

[0867] In some embodiments, the intronic domain that promotes trans-splicing primarily in the heart comprises or consists of sequences from the gene PRDX1. In some embodiments, the sequences from gene PRDX1 comprise or consist of:

(SEQ ID NO: 808)
GCCTCCGGGTTCAAGCGATTCCCCTGCCTCAGCCTCCCAAGTAGCTAGG
ACTACAGGCGCGCCACCACACTCGGCTAAGTTTTTGTATTTTAGCAGAG
ACAGGGTTTCACCATGTTGGCCAGGATGGTCTCGATCTCCTGACCTTAT
GATCCGCCCTCCTAGGTGGCCTAAATCTACATTTTTACATAAGATAAGG
TGAATGTTTGAAGAAAAAGGGAATGGAGGAAGAAAACAATTATGTGGTG
GACTCAGGGTAATCTAGTAGTAAGGTACTACTAGAAAGGTAGAAAGTAG
TCTAGTAGAAAGGTAATCTAGTAGTGAACATTTATGGAATTTGTGGAAT
AGAGGCCAGGTGCGGTGGCTCGCGCTTACATTCCTAGCACTTTGGGAGG
CCAAGGCGGGCGGATCACCTGAGGTCAGGCGTTGGAGACCAGCCTAGCC
AACATGATGAAACCTCGTCTCTACTAAAAATACAAAAAATTAGCTGGGC
GTGGTGGTG

[0868] In some embodiments, the intronic domain that promotes trans-splicing primarily in the heart comprises or consists of sequences from the gene FGGY. In some embodiments, the sequences from gene FGGY comprise or consist of:

(SEQ ID NO: 809)
CTGCCCAAGACCATGGGAACCCACCTCTTGCATCAGTGTGACTTGGATA
TGAGACCTGGAGTCAAAGGAGGTCATTTTGGAGCTTTAAAATTTGATTG
CCTTGCTGGATTTTGGACTTGCCTGGGCCCTGAAACTCCTTTGTTTTGG
CCAATTTCTCCTGGAATGGCTGTATGTACCTAATACCTGTACCCGCATT
GTATCTAGGAAGTAACTGACTTGTTTTTTATTTTACAGGCTCATGGGTG
GAAGGGACTTGACTTGTCTCAGATGAGACTTTGGACTGTGGACTTTTGG
ATTAATTCTGAAATGAGTAAAGACTTTGGGGGACTTTTGGGAGGGCATG
ATTGGTTTTGAAATGTGAGGACCTGAGATTGGGAGGGGCCAGGGGCGGA
ATGATAATGATTTGGCTGTGTCTCTATTCAAATCTCAACTAACTTATAT
CTCCCAGAATTCCCACATGTTGTGGGAGGGACTTAGGGGGAGGGAATTG
AATCATAAG

[0869] In some embodiments, the intronic domain that promotes trans-splicing primarily in the heart comprises or consists of sequences from the gene FGGY. In some embodiments, the sequences from gene FGGY comprise or consist of:

(SEQ ID NO: 810)
TAAGTCAAATTAAACATCCTATTCTTCCCAGTCTCAGGTTTGTCTTTAT
CAGCAGCATAAAAATGGACTAATGCAGTAAGTTAGTAACTTTCCCCCAT
ATTTTTGTTAGTGGAAAGATAGAATAGTTTTTTTTTGTTTTAATGGAAA
GATAGAATAAGAATCTTGGATTCTTTAAGGCCTGAACTTAGATGCCAGC
AGTGGCTGGGAAGGGCACAGGAAGGTGATAGTCCATGATGACGGGTTGA
TACAGACTTACTTAATATATGTTGACTATGTTTTATCCTTATTATGCCT
TCTTATGCCTTCTTATGCCTCTTTCTTTACCCTTCACCTTACAGCCAAT
CCAAGAGTTGGATATCTCAAAAAAATTAGGAGGCCTGGGTGCAAATGTT
TCCTTTCATTTCTACCTTTCCTATACCCCTATTAGGATGTGGAGGTGAA
CAGATGCCTGAAAATCTTGAAAAGGTTGTCCATGGGTCCAACTCTATAT
TAACTAAAT

[0870] In some embodiments, the intronic domain that promotes trans-splicing primarily in the heart comprises or consists of sequences from the gene LEPR. In some embodiments, the sequences from gene LEPR comprise or consist of:

(SEQ ID NO: 811)
TCTTTCTCCTTCCCCTTCTCTTCCCTCCCCTCCCATTATATAATCTATG
CTGTTATGTTACCTATTTTATCCACTACCCCATCTTTACTGGAGGTGTT
GTTCTAGTGGACTCTCCAGGAACTCCTCTATCCTCCTACTTCAATCAGG
ACTAGGCTTTCTCTAAAATTACTATAAGCCATCACTCTAAACTTTCCCT
TAACTGGTTTCTGGTTAGTACTGTTTCCTGGATTCCTTTCCTTCATCTT
TCTTAACTACACCCTTAAGTAACCTCCTAAGAAGTATGCGATAAGTCTC
CATCTCTCCATGCCTGAACTGCCTTTTATTCTGCCCTCCTCGATTGTTA
GTTTGGTGGAGTATCAATTCTTAGAAATAGCCTTTCCAAGAGAACATTG
AGATAATTCCTGCCTTAACATATAGTATCCAGTGTTGCTTCTGAGCAGT
CAGATACTATTGTGATTTTTACTCCTCACTGTTTACTTATAATTTCCTT
TTTAAACAG

[0871] In some embodiments, the intronic domain that promotes trans-splicing primarily in the heart comprises or consists of sequences from the gene LEPR. In some embodiments, the sequences from gene LEPR comprise or consist of:

(SEQ ID NO: 812)
AAAAAAAAAGAAAGAAAAAAAAATTCTCCTCATTTTTGTTGTTTTGAAT
TTTCAGTGATGAATCTGGAGTGGTTCTTTTTTTATTTAATGTGGTTATT
TTTTGAAGAGACTTTCAATTCCATGTCTCCTGTCAATTCTAAGAAATTA
TATTATTTCTTTGATAATTTCCTCTCCTCTTGTTTCTTTGTTTCTCTTT
CTAGAATCTGTATGTTGGATGATGGACCCTCTGCGTAGATCTTCCACAT
CTCTTACCTTTTATCTCATATTTTCGGTTTCTTTGTTTTGTGTGTGTGT
GTGTGTGTGTTATATTCTGAGACCTTGCCATACCCTCTTCTTCCAGTGC
TTCTGTTGGATTTTTATATACTATTATTTTTGTAAATTTCCAAGTATTC
TTTCTCAGAGTATTCTGTTCTGGTTTTATGCATATTTTCTTAAATGTTG
CTAGAAATACCAATTCGAGGATTTTTGTTCTTTTATTTTAAAAATTCTT
TTTTCTTCT

[0872] In some embodiments, the intronic domain that promotes trans-splicing primarily in the heart comprises or consists of sequences from the gene GBP7. In some embodiments, the sequences from gene GBP7 comprise or consist of:

(SEQ ID NO: 813)
AAAGAAAAACTATGAGGTTCTTGCTTCAATTTATCATGGGCTTGAAAGA
ACAGTTTGACAGGGCACTGAGCTGGCAAGGGTTTGAGGATATTGTCAGT
GTCTCATATTTGCTAGTGAGAGTGTGAACTGTTGGAATCATATATGAAA
TATTTAAGTGCACATACCTTTGATCTAGCATTTCCACATTTAGAAATCT
ATCATATAGATTGATTTACTCAAATTGAAAATGGTATATATAAAATAGT
ACTTATGTTGCAGCATTGTTGTAATGCCAAAAGACTGAAAAAAACATTA
AAGCCCCTCTTTCAGGTACTGATAAGGGAAATCTTGGGAAACACTCATA
AAGGAATACTCTACAGCCACTAAAATGAAGGGAGAAGCTCTATTTGAAC
TAACAATGACAAGTCTCCAAGATGTATCATAAGTAAAAAAAAAAAATGA
TGCACGAAGCATGTATAATTACTACCACTGAATTTAGAAAATAATAAAT
GTATGCATA

[0873] In some embodiments, the intronic domain that promotes trans-splicing primarily in the heart comprises or consists of sequences from the gene GBP7. In some embodiments, the sequences from gene GBP7 comprise or consist of:

(SEQ ID NO: 814)
GAAAGTATCAGATTTGGCTTGATATGAAATGATACTGAATGATCTCAAA
TTGCTCCATTTGTTTCTGTATCTGCCTGACTCATCCTATACAACTAGAG
TAAAACATATTCCTTGTCCCAAACTGGAGCTTGACAACCAGTGTTTTAT
ACAGGGTCAGCAGTCCCCATTATTTGCTAGATGAGCATGGCCTTGCTAT
ATCGGTGGAAAGGGGAATCAATTAGAATTAAATCTGCATTCCCTCTCAA
AGGGCATTCATTGTGCTGGAACAAAATTCCTCCCCACCTCCAGTGAGAT
GGTGCTGAGGAAATGTCACAAAGGTGTATATCATGGATACTCCCCTTAT
TTAGGTCCAGTCATCTGGAAATGTCAGACCAACTCATCAAAGATTTTCT
AAGATGTTAGAGAAATGGACACATGTTTAACTAATGAAATTGTTAAATA
CAAACCTCGGTCTCTTAAAAATTGGGGATTTTCAAAAGTAGGCTCTTTT
ACTTTTATA

[0874] In some embodiments, the intronic domain that promotes trans-splicing primarily in the heart comprises or consists of sequences from the gene ENSA. In some embodiments, the sequences from gene ENSA comprise or consist of:

(SEQ ID NO: 815)
GTGGGTGAAACATCCCTGTGGAGGATCCCAGTTATTGAGTCTTAGTCAC
AGATGATAATGTGATGCTGATTTGCATTTACCTTGCTGGAGGCAAGGCA
GGCGTGGGCAGGCTGTCACAGTCATGGAACATGTGTGGGAGCTGTGAGA
GTCAGAAGGAAAATACATTATCCTCATGAACAGGCCCAGTTTCTATTCC
TGGTCTGGGAGAATAATCATTTTGAGGTTGTTGGCTTGTGGTTGATCTC
CTGGTGGCTAGGATAGCCCCATATTTATCCTTCTCTATATCTTATTCAT
TTCTGTTTCTCCAGTTCCAGGCTATTGCCCTGTACCCAGTAAGGTCCTC
AGTTACCCTTTATGAATAAGTGATTTTGGTGGAACGATCCTCTACTGAG
TGGAGTACAAAGGATGGCAGGGGCTATCCCTTGACTCCAAAACTATATA
CTCTAGCTGGGAAATTGCTTATGTACCTGAAAAAGTCAGAACACACTGG
GGAGAAGAC

[0875] In some embodiments, the intronic domain that promotes trans-splicing primarily in the heart comprises or consists of sequences from the gene ENSA. In some embodiments, the sequences from gene ENSA comprise or consist of:

(SEQ ID NO: 816)
GAAGTGAGCACCAGCCATTAATTATACTCCTGCAGCAAATGTATTTTTC
TTGTTCAGAGTGGTCCTCCTTACCAAGAGAGAGTCTACTTTCATAGCCA
TGTAGCTCCTGATCAGATTTTTAGTTCCCAAAGGTACCTAAAGCTGACT
GAGGGATTATATTATCGTTTTTTAAAAAAAAAATTTGGCCAGGCGCAGT
GGCTCACGCCTGTAATCCCAGCACTTTGGGAGGCCGAGGCGGGCGGAGC
ACGAGGTCAGGAGATCGAGACCATAGTGAAACCCCGTCTCTATTAATAA
TACAAACACTTAGCCGGGTGTGGTGGCGGGCGCCTGTAGTCCCAGCTAC
TCGGGAGGCTGAAGCAGGAGAATGGCGTGAACCCGGGAGGCGGAGCTTG
CAGTGAGCCGAGATCGTGCCACTGCACTCCAGCCTGGGCAACATAGCGA
GGCTCCATCTCAAAAAAAAATTTTTTTATTTTCCTTACTCTCCTCTGCA
ATGACTGTA

[0876] In some embodiments, the intronic domain that promotes trans-splicing primarily in the heart comprises or consists of sequences from the gene SLC39A1. In some embodiments, the sequences from gene SLC39A1 comprise or consist of:

(SEQ ID NO: 817)
GTGGCCCACGAAGCTACCCAAGACATCTCTGCACAGCCCTAGCCTTTTT
GGCTTCACCCACTCCGTTCGGGAGTTGGGGACCCGGCCTCTACATTCCT
TAGGGGAACTCCAGCTCCAGGTCCTATTTGGAGGCGGCTCCTAGTTTCC
TAGTTTTCTGGGGGCACCAGGTGAAAGGGTGATGAGATATCCATACAGC
CTTTCTCATGCCTCGGTTTCCCCCGTGCAGTCTCCCTGAATAAGTCACT
TGGGAAAGAAAGTGTGAGAAGAGAGGAATGTTCCTGGTACAGGAGTAGA
TGAGTCACCCTGGGTAGGGGAAGGTCACAAAGTGGCTGGGGCCAGGGAG
CTGCACTCTGCTGACCAAGCTTCCCCATTCCTTGCCCCATCTTCCTTTG
CATGATTTTTCCCAACCACTCTGGTCTGTCTTCCTAGGTCTGAGAGTCA
CTGGAGCTACCAGAAGCATCATGGGGCCCTGGGGAGAGCCAGAGCTCCT
GGTGTGGCG

[0877] In some embodiments, the intronic domain that promotes trans-splicing primarily in the heart comprises or consists of sequences from the gene SLC39A1. In some embodiments, the sequences from gene SLC39A1 comprise or consist of:

(SEQ ID NO: 818)
AGACTTGACAATGCGGGGTCTCCCTCTTTTAAAAATATCCATATAATCA
AAGCCTTTGTTGACTGGCCCGCTCCGGCCCCTCAGTCCTCCACAGATGC
GCCCCAGGGCCCCAGCCCCGAGGTCCTTTTCCTAATATCCGCTCTTGCT
CTCGCTCACTCTCCTCAGGTCGCCTGCTCCGCCCGCTCCCGCTCCCGAT
CTCTGATTGCTCCTAACTGACGTCACTCCCGGTCTGTCCCCGCCCACTC
GGTGCTGCCATTGGCAGTCGGTCGTGGGTACGCGGCTCCTGTGGGGGAG
GGGGGAGCTATGGGAGGGGGCGGGAATTCCCGACTCTAGGCCGGAAGCG
CGCGGAGACCATGTAGTGAGACCCTCGCGAGGTGAGTGCGGGCTGTCTG
GCAGCGGGGTCCATGTCGGCTGCCCAGGCCTCCCCGGGCCCGGGAACAG
GAGTCCCAGCTCACGCATTCTTCATCTGCTTCCCGCGACGCTTGGCGGC
CTCGCACCC

[0878] In some embodiments, the intronic domain that promotes trans-splicing primarily in the heart comprises or consists of sequences from the gene RAB13. In some embodiments, the sequences from gene RAB13 comprise or consist of:

(SEQ ID NO: 819)
GTAAGGCTCCTAAATTCTAGTCCCTCAACCCCTGGCTCTGACCCTTCCC
CCGTGCATGTCTCTGTATAGTAACCAAACCTCTCACCTCTCTGAGGCCT
TCAGGTAACTCTTCAACTGCTGCCAGCTCCTCATTTTCTTGGTACCATC
GCCTTAGTCTCCCCAAATCCACAAGAACTCTTCTCTATTTTTCTCTGTT
CCCCTCTTCCCCTACCCCCACCACCTAGAACTCTCTCGATCCTATCTCC
ATGTTTCCTGTATCCCTGTCCGCCACATCTTTTTCTCCCGATCCGATGC
TAGCCTCTTTCTGTCTTGCTGAGCTTCAAACTCTCCCACTGTGTCCCCA
CCTCACCATCTACTTCCCAGGTTCCCTGCCCCAGTCTCCCTGCACCTCA
GCTGAACAAGGGTTTGGGAAGGGTGGAACAAGGTGGCTGGGTGTGCTGG
AGGGTGGCCCAAGGACTGTGATCATGAATATGCAGCCAGCTTGGTGAGG
AACGTGGAA

[0879] In some embodiments, the intronic domain that promotes trans-splicing primarily in the heart comprises or consists of sequences from the gene RAB13. In some embodiments, the sequences from gene RAB13 comprise or consist of:

(SEQ ID NO: 820)
TCGTCGTGGTTAAACCTCTACTTCCCTTCACCCCAGCCTCTCTGGCCTC
AGAATGGAAGAGTAAGGTCCTAAGAGGGGAGCTACAATTACCGAAAGGC
TGTGGAAAATAGCGAGAGAGACAGGCCGGCCTAAGCTAGGAAGGGAAAA
CCGAGAGAACAGAGGCCGGGCTGGCAGCCTTGGCCTGCTCAAAAGGGTG
GGCGGGCAGGGGGTGGAGCCCGGAGGGGTGCCGCCTCTCCTCTTTCCCG
GAGCCTGGGCGGAGAGGGAGGAAAACTTCTTCCTGGCCTGGGCTCCGTG
CCGCTCTGTTTGCCAACCGTCCAGTCCCGCCTACCAGTGCCGGGCGCTC
CCCACCCCTCCCCCGGCTCCCCCGGTGTCCGCCATGGCCAAAGCCTACG
ACCACCTCTTCAAGTTGCTGCTGATCGGGGACTCGGGGGTGGGCAAGAC
TTGTCTGATCATTCGCTTTGCAGAGGACAACTTCAACAACACTTACATC
TCCACCATC

[0880] In some embodiments, the intronic domain that promotes trans-splicing primarily in the heart comprises or consists of sequences from the gene FMO4. In some embodiments, the sequences from gene FMO4 comprise or consist of:

(SEQ ID NO: 821)
CTCCCAACGTGCTGGGGTTATAGGCATGAGCCACTATGACCAGCCTAAA
ATGGGGTCATTTTAAGTGTTTACATCTAACCAACTAATAGCTTTAACAC
AAACATGCACACACACACACACACACACACACGTACAATGTGGAGGGTA
TACATACAATATAATATAAATTATATTATTTATACAGCAAAAGCAGATG
AAGAGAGACAGGGCAGGCCAACTGGCACAGGTGCAGGTGTCTGGTGAGT
GTGGCGCAGGCTGACAGCTGGGCCATAGAGGCATCTCTCCTCACAATTC
TGGCAGTAGAGTACCCTGGTTAAGTGAACTGGGCGGGGAATTTTACCTC
CAGAAAATTATTTTCTGTGCTGCATTTCCATTCTGAGCTTTGACTATCA
TGTGCTCTGAAGTTAGAGCAGTGGGAGGCTAGAAATGAGTGGGTGGAGA
ATTTAAATAAAGGAAAAGCCACATGTGACTTTAGTGTTGTTTGTGATTT
TTCCCACAG

[0881] In some embodiments, the intronic domain that promotes trans-splicing primarily in the heart comprises or consists of sequences from the gene FMO4. In some embodiments, the sequences from gene FMO4 comprise or consist of:

(SEQ ID NO: 822)
TATGAAATGTAGCTTGCTCTAGGGCAAACTTACAGTATATTCTGTTACA
AAAAAAGGATTCAGAGTATAAAAGCCATTCCTAGAGAAGCAGTATGGCA
GGTTGGAAATAACTCTGCATTAGGAATCAGAAGGATACATTTTTAGTCC
TAACTCTGCCACCAATCAGACGTGGCCTTAGACAAGTCATCTGGGGACA
CCAGGTCTTTTCAGTGGAACACACAGCCTGGCCCCCTACCAGTGGCAAT
CCTGTCTTCACTTAGTCCAGGAAATCTATTCTGACTTCACTCTCTTCCT
ACCTCTCAGGCTGCTCTTTCTCTGTATTTGCTGGTATCGCCTCTTCCTC
ACTCCCAAAATTTAGTGAGCTCCAAACTTAGTCCTCAGGCCTCTTCTCA
TTCCTATTTACACCCACTCCCAGGTGGCCTCATCCAGGCCTGTGGCTTT
AAATATCATCATATACTCAGGGCTCCCAAACTGTGTCTCTGACTCAAAT
CTTTCTCCA

[0882] In some embodiments, the intronic domain that promotes trans-splicing primarily in the heart comprises or consists of sequences from the gene CFHR3. In some embodiments, the sequences from gene CFHR3 comprise or consist of:

(SEQ ID NO: 823)
CAGATGACTATTAGAAAGATTATACCTTTCTACAGTTCTGTTTCTACAT
TGTGGGCATAAGAGAAAAATATAAACATAGAATTAAATTAGCAAAATGT
GAGTACATTTGGAGTGCTTGTAGTCACGGCTTGTCGAATGGGGGAAAGG
AGGATAAGTAACCATGACTCCAATGGAACATGTTAGCATAATCCTTTTT
GATATGAAGTCACTAGGGTGGACACAACATATTTTAGGAAAGAAGAGTT
CAGGCTCTAGAGAAAGACTGCCAGGGTTCACGTTTATCACCTCACCTGA
TGATCTCTGCTGTGATGTTGGGGAAGTGCAACTGAACTTATTATATTTT
TGAAATGCTAACGTCAGTATGTAGCACAAGTTAATAACTATTAACTATT
TGGATTATTTTATAATTTTATTTTATCCTAAACTACTCATTAGGATGCA
TTTTATTTGCTCATGAAAGAGAAAATTATGATTGTTAATTGTTTTTTTC
TGCTTTCAG

[0883] In some embodiments, the intronic domain that promotes trans-splicing primarily in the heart comprises or consists of sequences from the gene CFHR3. In some embodiments, the sequences from gene CFHR3 comprise or consist of:

(SEQ ID NO: 824)
AAAAAAGAAAAGAGGTTTTGCTAACCCTTTCAGAGCATTGGGAACACAG
CCAGAAGTGCATTAAATGTATATATTAACTTGGGCAATGTTGACACTTT
AGGATGCTGAAGCCAGGTGCAGTGGCACACGCCTGTAATCCTAGCACTT
TGAGAGGCCAAGCTGGCAATCATCAGAGGTCAAAAGTTCAAGACCAGCC
TGTTCAACACGGTGAAACCCTGTCTCTACTAAAAATAGAAAAACTAGCT
CGGCATGATGGCGTGCACCTGTAGTCCCAGCTACTCAGGAGGCTGAGGT
GGGAGAATCACTTTAACCAGTGGGGCAGAGGTTGAACTGAGCCAAGATA
GTGCCACTGCACTCCAGCCTGGGCAATAGAGTGAGACTCTGTCTTAAAA
ATAAATAAATAGGATGCTGAAAATTCCTATTTAAGGAAATAATTCTTTT
TCTGATTTATTTAAGGCTACATTTGTATTTTCTTAATACAAATATTTTG
AAAGTTTCT

[0884] In some embodiments, the intronic domain that promotes trans-splicing primarily in the heart comprises or consists of sequences from the gene C4BPB. In some embodiments, the sequences from gene C4BPB comprise or consist of:

(SEQ ID NO: 825)
TGACCTGACAGGAGGTGGAGCTCAGGCAGCAATGTGAGCAAAGCAGAGT
GGCTATAAATACAGCTGAAGCTTTGCTTGCCTGCCCGCTGCTCACTTTC
TGCTGTGTGGCCCAGTTCCTAATAGTCCGTGGACCGGTACCGGTCTGTG
GCCCTGGGGTTGGGGATCCCTGTTATAGAGCAAAGCACATAAGCACAAT
GCGTGAGAATTGGAAAAGTCTCTAAAATTCTTCTAGGCTCCAAAACTAA
ACAAACAACACTGAACAGATCCATTTTCATTGAGATTCTTCTTTTAGTT
CATATTTATTACTGGGATAATATTAATAAGTATATTTAAGCCAGAAAAT
ATAAATGATTTGCCATGTTGAAAACCCAAATCTTTACTTAAGCTAGCCT
GGTTCTGAGCCCCCATTCAGAGAGCTAACTGCTGCTCACTGGCTTCAGA
GTATATAGCTGGGTCTCAGTCCTTATGTTGTAACTTGTGAAAAATTTTC
TTTCTTCAG

[0885] In some embodiments, the intronic domain that promotes trans-splicing primarily in the heart comprises or consists of sequences from the gene C4BPB. In some embodiments, the sequences from gene C4BPB comprise or consist of:

(SEQ ID NO: 826)
TTGGTTTCAGATTTACCTCTTATTGGGCTGAAATTGCCAACAGCAGTTG
TATAATGCACCATGTGTGTGTGTGTGTGTGTGTGTGTGTGTGTGTGTGT
GTATGTGTGTGTGTGTGTGTGTGTGTGTTGTTCTCAGAATGTGAAAAGG
CCAAATGTAGTGGTTGTCTAAGGCCAGAATTAGCAACATATTATTGGAG
AATAGAGGGCTTAATTTCCAGTCTGTAAGGAGAATGGAAAACTCTGATC
TCAGCCGAGAGAGTAACTCGTATTTTAACATGAGACCATGAATTATGAA
ACCAAAACTAACCGCAACTTATGAGGCAAAAATTAACCTTCCATTTTGG
AAAAGATGCTTAGAATAGTTACATCCTTAAAAATGACCCACTGGGACAG
AAGGAGAGCTAGGACCCAAATTCTCCTCCCAGTCTTGCCCACATCTGGC
TTACGGAAACAGGTTTCCAAAGCTGCAGGAAAATTGCTTACTGCCTCTT
GAATGAAAC

[0886] In some embodiments, the intronic domain that promotes trans-splicing primarily in the heart comprises or consists of sequences from the gene EPHX1. In some embodiments, the sequences from gene EPHX1 comprise or consist of:

(SEQ ID NO: 827)
AAGGCGGCAGCGGGGTTGGAAACCCACCCCCACACAGTCAACACCTGCT
GTCACACCAGGCTAATCAAGAACACTTTTCTTTGGTGCATTAACCACCT
GCTATTAAATAAAGGGCTGTTACTAGGTGGCAAAGTAACACACTGCAGT
AGAGCCTATTTGTAATCTGAGATCAGTGGCTGTAAGGCACCATCCTTGA
GCCAAGCAAGTACTAATATTCTTGTTATCTTAATTAGAATGCAAGAGAT
CGTGTTTTTAAAATTCTCTTTGAATCTGTCACTTTGCCCTCCTCTTCCT
GGGTGATACACCTGGTAGTGCTGGTGGGGGCCATCATAATGCCCCTTGT
CCCAGATTCCCTTCTTTTAGATGGGACTCGAGCACTGATCATTTCAGCC
CTGTATCTCTCAGGTCAGCGTGGTTCAGTTTGCTGTGCAGAGTCCAGGG
GAGATAACCACGCTGTGCACACATGAGATTGGCTGACTTGGCAGGACTG
TGCAATTGT

[0887] In some embodiments, the intronic domain that promotes trans-splicing primarily in the heart comprises or consists of sequences from the gene EPHX1. In some embodiments, the sequences from gene EPHX1 comprise or consist of:

(SEQ ID NO: 828)
TAAGGAGGGTGGTTTGTAAAGTTCACTGGGGAGGGTGATCCCTCTTTAT
TGTTCTAATATTATGCTCGCAGCCTCCTTGACAACATCATGCAAAATGT
GTCTTACTAGCTTCTAGTGCATAAAATATTGGTGGAGCTCTTCGCTGTG
CTGGGCCAGTCACCAGTGCTGGGCACTGTGGGTCAAGGCAGTGCCCAGG
ACGGGCACAGCCCTGCCTTCCCAAGCTATGGTTTATTGTGGTAGGATCT
GCCTGCCCAGTGAAGTGTGTTCAGCTGCTCCTGTTGCTGGGGGAAGCTC
TGCTCTCTGCCTTCGGCTGCCTCCCACACGCTCCCATGTGTCTCCCAGT
CCCTAACCCCTAGTCCTGCTTTCAATACCGCAGGGGCTTTTAGCTGACT
TTTCTCCATCTTCTTAAAGGGCAGGATTTCCTGGCAGAGACATAACGTC
TTTCTGGAAATGAAAGAAGCTGATGCATGTTTTTTCTTTTCTGAATTAC
TTAAATAAG

[0888] In some embodiments, the intronic domain that promotes trans-splicing primarily in the heart comprises or consists of sequences from the gene RBM34. In some embodiments, the sequences from gene RBM34 comprise or consist of:

(SEQ ID NO: 829)
ATGAAAGCCTGCAATGTACTTTGGAGGGTGGATGGGTGACTTATTTACT
GTGTCAGCAGAATAGACTGAAAAGTTAATACTGATTATCATTGCTGGAA
TCCTAGGCATTCTCTTCCTATGTCCCATCATACACATTAGTATGGGAGG
TGGGTATGATTGCTGCAAACAGTCTTTGTTCTCTGAGCACAGACAGATA
AAGAATTTATGTCAATTTAATATTAAAACTTTATAGAAGTGAGTTGGAT
TTTACCAGCTCAGCACTCTGAACCAGTTATAGCCACATTCTTTGGAGCA
GGAAATAAGTATCATTTATATTTGGTTTTCCCATACATGATTTTTTTTT
TTAACTGCATAGGCATAGTTAGTTGACGTACCATAGTGTACATTTTTGG
GCACTATTACATAATTAATGTATATTAGAATATAGGAAATGTTTATTCT
ATTTTTTTTTTTGAGACAGAGTCTCGCTGTGTCTCACCCAGGCTGGAGT
GCAGTGGTG

[0889] In some embodiments, the intronic domain that promotes trans-splicing primarily in the heart comprises or consists of sequences from the gene RBM34. In some embodiments, the sequences from gene RBM34 comprise or consist of:

(SEQ ID NO: 830)
CCTACTTTCCTGAAATGTTCTTAAAAACTGGCAGTAGGCCGGGTGCGGT
GGCTCATGCCTGTAATCCCAGCACTTGAAGAGGCTGATGTGGTTGCATC
ACCTGAGGTCAGGAGTTTGAGACCAGACTGGCCAACATGGCGAAACCCC
GTCTCTACTAAAAATACGAAAATTAGCTGAGCATGGTGGCGGGCGCCTG
TAATCCCAGCTACTTGGGAGGCTGAGGTATGAGAATCACTTGAAGCCGT
GGGGGCGGAGGTTGCAGTGAGCTGAGATCACACCACTGCACTCCAGCCT
GGGCGAAAGTGCAAGACTCTGTCTCAAAAAAAAAAAAAAAAGCCTGGCA
GTAGAGGATTATCAGACAATTTTTCTTAATTCCTTTTTGTAGCACTTAT
TTGATGTTCTGAAGGTCAGCTAATGTGTATTTTTTTTTTTAATTTTAGA
AGCTGAAGTCGTTTTTTAAAGAGTATGGACAAATAGAATCTGTACGATT
TCGTTCTCT

[0890] In some embodiments, the intronic domain that promotes trans-splicing primarily in the heart comprises or consists of sequences from the gene KMO. In some embodiments, the sequences from gene KMO comprise or consist of:

(SEQ ID NO: 831)
TCATGAAATTTAAATGTAAGACCTTTTTGTCCAGTATAGATAAGTTCTG
AAATAAGGCAAAAGATAAAGTAAAAAATATATATATAAATATATAATGT
ATGTGCATACATTATATATGTGTGCATATACACACATGTACACATCTAG
ATATGTGCATGTGTGTGTACATATATACCAGGTATAATTATACCAGCTA
TGATTCAAGATTTGAGAACATAAGATGTTCTCTCTGTCTTTTTCCTTAC
ATATACACACACACGCACGTATTCTGAAATCTTGAAATATACCTGGTAT
CAAAAACCTACCTAAGGTTGAGTTTATAAAGACAGAACACAAAGTGTTT
TCTAAGACAACTTCTATTTTATGTAGCAATAGATGTGCGTATCATCGTG
TAGATGCTACTGGTTTTAATTACTGTGGAAACTATTATAAAGCTGAGTC
CGTTTTATAGGTTTGCTATATGAATGCACTAATCAATCATATATTCTTT
TTTCTGCAG

[0891] In some embodiments, the intronic domain that promotes trans-splicing primarily in the heart comprises or consists of sequences from the gene KMO. In some embodiments, the sequences from gene KMO comprise or consist of:

(SEQ ID NO: 832)
TAGTATAGAATTTTTTATCAACTGTAATTTTGCATTTGTAATTAA
TGTTGTTTATTACTTACATTTGTACTTAGAATGTATCTACCTAAT
TGATCTCTTCATTGTTTAATCCATTTAGTGATTATAGCTTTGAAA
CTTTGGGATTACTGAGGAAAAATCTGAAGGATTTCCAATTATTTA
CTTTGGAAAGGAGATTTAACTTACATGAATGGATAACAAGAGTTT
ATGTGTGGTGGTGCCTGTCATCTCCACTAAAGACAATTTAGGAGG
AAACAGCCCTTCCAGTAAAGCCAAAGAGATTTAGGTTATCTATCA
GGAAGTGATTCAGCCTTTAAGGTCTGTAGTACATTGGAATACGCA
TTATCAAAAGAGAGCATGGGGATGGGCGCAGCGGCTCACACCTGT
AATACCAGCACTTTGGGAGGCCAAAGCGGGAGGATTGCTTGAGCT
CAGGAGTTCAAGACTGATGTGGCCAACATAGCAAGACCTTGCCTC
TACT

[0892] In some embodiments, the intronic domain that promotes trans-splicing primarily in the heart comprises or consists of sequences from the gene RMDN2. In some embodiments, the sequences from gene RMDN2 comprise or consist of:

(SEQ ID NO: 833)
ACTTGTCCTAGGAATATCACCAGTTGTTTTTGTTCTTGAAAAGAA
AAGGATAGAGAAAGAAGACTGAGGAAAATGATTATGTAAAGAAAT
CTGAAAACCATAAAGTATCTCATTGCTTTGTAAGCTTTATGACCA
TGGTAATCAATTTTATTTTAATGGCTAAATGCAAAGGCTATGTTT
CCACCCAAAAGATACTTAAACTGATCAAGTGATTCAAATGTGAAA
CAACCAACCTAAATTCTTAGGGCAGTTTGGTTCATAATATTTGAT
TTATTTAAATATATTCTCTTCACTTGTGGTTACTGTTATTTTAAT
ATTGCCCTGTTATTCTCTCATGTTTTTCTCTCAAATCAGGCTGAA
GAACTATGCCCTGGTTATTCTAATCCCAATTACATGTACTTAGCA
AAGGTAATGAAGACCACTGTTCTGCTTTAAGATCACTTTGAACCT
ATCGCATAAAAACGGATTATGTTTAATATTGGTTATTTCTCATTT
CCAG

[0893] In some embodiments, the intronic domain that promotes trans-splicing primarily in the heart comprises or consists of sequences from the gene RMDN2. In some embodiments, the sequences from gene RMDN2 comprise or consist of:

(SEQ ID NO: 834)
TAAGTCCAGAAAGTGACAGTGAGTGCTGTTGTCTTGTTAGTACTA
TTCGAGCTCAAAACAGGAATAACTCGCTTAGATACATTTGTAGTT
TTCTCTATTCAATTTTATGTATTTATTTTTATTCTACCTTTATTG
AAGTATAATTGACAAAAACTATATGTATACAGCATGATGTTTTGA
TAGACATATACATTATGAAATGACTACCACAATCAAGCTAATTAA
CACATTCATCGCCTCACATAGTTACTTTTTTTATTGTTGAGAACA
TTTGAGATCCACTCTCTTAGCAAATTTCAAATATACAATACAGTA
TTATTAACTACAGTCACATTGCTGTCCTTTAAATCTCCAGAACCT
ATTCATCCTGCATAACTGAAACTGTGTACCCTAGACCAATATCTC
CCCATTTCTCCCACTCTTCCAGCCCCTGACAGCCACCCTTCTACT
CTCTCCTTCTATGATGGAGTTTTCTTTCTTTTTTTTTTTATTATA
CTTT

[0894] In some embodiments, the intronic domain that promotes trans-splicing primarily in the heart comprises or consists of sequences from the gene SPTBN1. In some embodiments, the sequences from gene SPTBN1 comprise or consist of:

(SEQ ID NO: 835)
GCTCGCCGGGCCGCCGCCGCGTGGTTGGCGCCAGCGCACTGGGGC
AGTCGCGCGCGCCCAGGTGCGGGCCGCGTTACCTCAGCAGACGCT
AGAGAGTGAATGAGCCGCGCGGGCCCGGGACCCTTGGGGCTCTTC
ACTCTCCAGGCCGTCCCGTGGGCGCGCTAGCCTTTTCAAGTGATA
GTAATCGGAGACTTTTCCGTTACATGAGGCTCAACAAAAGATTGT
AATTCCAGCAGCTCTGTTTGGGAAGGCACTACCGCGGCGAGTCCA
GGGCCCGGCCGGGGGTCGGCGGCTGCCGGGCGGCTGGGGCGACCG
CGGACCGTGCGGGACCGGTAGGGGGTCGCGGGCCGGCTAGGCTCC
CCCGCGCCCCTCCTCGTGGTATAGCCTGCATTTCTAATACAATGC
TGTTATGCTAATCAGGTGACATCACCGCCCAGCACACGGCGAGTG
GCTCCTGATAAAATTACAAACCGGCGGCCGCCGCGGGCAGCTGGG
AGGA

[0895] In some embodiments, the intronic domain that promotes trans-splicing primarily in the heart comprises or consists of sequences from the gene SPTBN1. In some embodiments, the sequences from gene SPTBN1 comprise or consist of:

(SEQ ID NO: 836)
TAAGCCCCCTCCCAAAGGCCGGGCCTGTCCTGGGTGCCAACGGGG
GTTCTTGGAGGCTTTATTTGTGACCCTAATGAAGACGGGCGGCTT
CACAGCTCGGCCCCAGACCCTGTGGTTGGCTGCGGGCACCCCATT
CACGACTTAGGGAAGGCAGTTGCTCATACTCCACTCCAGAAGAGC
TACCATTTGGAGTCCCTGTCTCTCCAGCACCTTTTTGGCTTTCTA
GGTTGTCAGATAACTGCTGCACACACATTTTCTTTACTTTTAGCT
AACTTTACCTCCTAGTAGATCAGTGCTCATAGACTTATTAGTATG
CAGGTATTTGATTCCGGGTCGCCTCTGGCTCCCAGCCCCCAGCCT
CTTACCTCTGGGAAGCTTTAAAGGTGTAAAGTGCCGTGCTCAGAC
CCAGTCCTGTAGAACAATAGCAAAGGGGAGGAGGGAGGGGTCTTT
TTGTTCCTAAGCCTTTGGTAAATTACAGTTTTTTATTCAGAAGCT
TAAT

[0896] In some embodiments, the intronic domain that promotes trans-splicing primarily in the heart comprises or consists of sequences from the gene NFU1. In some embodiments, the sequences from gene NFU1 comprise or consist of:

(SEQ ID NO: 837)
GTGGGTAGTGCATCTGATGGAGCCGGCGGGTCCGCCCTGTCGCCG
TAGTTGGGGGTGAGCCCTGAGGCTGTCTGTGCGGGAGCTCGGCGC
TTCTGTGGCCTAATCCGGGCGGACTCTCTGGAGCTTCCTCTCAGG
CTCAGAGACCCAGTTCTTGAGTCTCTGCGGTACGGAAGCTTGTAG
AGACTGGCTGTAGAGCCAGAACGGAGGAGCTGTTTTAAAATCGTG
TGCCTCTCCCGCCCCCAGGCCCTCTACCGGGTGCATTCCCTCCTC
TTCTAAACGCAGAATCAGAATGTCACACAGAAGGGAAGAAAATAC
CTTGTCTCGTTTCCTCATTTTCCCAGTAAGGCCCTGAAAGAGGAG
GTGACATGTCCAAGGTTACACAGTTTCTAAGTGATGGAATTCCGA
CGAGAACCAGGACCCCTAGATTCCCTGCACCCACCACCATTAAGC
CCACTCTGTTCCCTTGTTTTTTCCGCCTCCCTGAGCCCTACCTTT
GAGT

[0897] In some embodiments, the intronic domain that promotes trans-splicing primarily in the heart comprises or consists of sequences from the gene NFU1. In some embodiments, the sequences from gene NFU1 comprise or consist of:

(SEQ ID NO: 838)
CGAGAACCTTTTAGAAGGAATGCTCCAGGGAGTCTTTGGGGGCAG
TCACTGAGCTGGGCCTGGAGGCTGAGTAGGGTCCTAGAGGAGGGA
ATGGGTCAGGTTTAGGGGCTGGAAACAGCATTCGCAAGGCAGCAC
CAGCACCAGCTAAAAACCTAGCCAACAGGGAAAACAAAGTACGGA
AACACGCATGCGTTCACAGTGCTGCGTGAATTAACCAAGCGTTGG
CGCAAACGGGAAAGGTTCCCCGGCCTCTCTTGGTCAGGGTGACGC
AGTAGCCTGCAAACCTCGGCGCGTAGGCCACCGCACTTATCCGCA
GCAGGACCGCCCGCAGCCGGTAGGGTGGGCTCTTCCCAGTGCCCG
CCCAGCTACCGGCCAGCCTGCGGCTGCGCAGATCTTTCGTGGTTC
TGTCAGGGAGACCCTTAGGCACTCCGGACTAAGATGGCGGCGACG
GCCAGGCGGGGCTGGGGAGCTGCGGCTGTTGCCGCCGGGCTGCGC
AGGC

[0898] In some embodiments, the intronic domain that promotes trans-splicing primarily in the heart comprises or consists of sequences from the gene PCBP1-AS1. In some embodiments, the sequences from gene PCBP1-AS1 comprise or consist of:

(SEQ ID NO: 839)
GTTGGTTGAGGGGTTTAACAAGGCTAAGAAGGTGAGTCAGGTTTA
GACTTTGGAAGTTGAACCACAGGATTTATGCTACATACAGAGGAA
TGATTGTTGCTTCCTCTTATGTTAAGTTGGTATGTCACGTAAAAC
CTTTCAGAGTGCTTTCACGTTACTTGTTTAATCATCACAGACAAC
TTTGCCAGTAGGGTCTTATGCCCATTTTACAGAAGAGCCATTTTT
GGATTAGAGGAGTGAAGTGACTTGCCCAACGTTACACAGCCTGTT
AGAATTTGAGCTGAACCTCTTGACTCTTAGTTATGGATTACACCT
TTCCATGGCTTCTGATGCTTTTGATATGGACTTTGATGTGTGGGA
TAGCTTTACCTTAAACTCAAAAGGCTTTCTAGCCAGTTACTATTT
TTCTGTCCCCAAACAGCCAATGCATTTACCTTAAGTTCCTAACTC
TTGTTTTAGAAAATCTCTTCCCTCTTTTCCCTGATGTTTACATTT
ATGG

[0899] In some embodiments, the intronic domain that promotes trans-splicing primarily in the heart comprises or consists of sequences from the gene PCBP1-AS1. In some embodiments, the sequences from gene PCBP1-AS1 comprise or consist of:

(SEQ ID NO: 840)
CTACCTACTGAAATATTTCCATAATTTCCTGTTATGTACTCCTGG
GACTTAGTGCACCTCCTCAGTGAAGCCTTCCCTTTCCCAGCTTCC
CCAGCTCTTAGCCTCCCTCCTTCCCCGAGAGTCTTAACAGTTTCT
CCCTTCGGTAGCCCACGTTTGGACGTTGGTTAAATTGTAATGTGT
CTTGGGGTTGGTAACATGTCATACAGACACCTTGGGTGATGCTGT
GGTCTGGCAAAGAGGTCATTGGACCTTGGAATCTGAGGCTCTGGG
CCCTAGTCCTAGCTCTGCCCCTGTCTAGCTCTGAGACTTCTACAA
CTCATCTGTCAGGGTTTCAGTTCTCCCTTTTATAAAGCAAGAGAT
TAAATGATCTCTAAGGGTCCTTCTACTTATGTCCAGGGACTGATG
ATATTTGATGACTTTGGTTATTTTTCTTTGGCGGGGTGGGAGGTT
TATGTAAATGTTTTCTGCACTTTTGGTAAAATCTCCACTCCCTTC
CTCA

[0900] In some embodiments, the intronic domain that promotes trans-splicing primarily in the heart comprises or consists of sequences from the gene IL1R1. In some embodiments, the sequences from gene IL1R1 comprise or consist of:

(SEQ ID NO: 841)
TCCTTAAGTGAAAAATCTGTGAGGAGTTTTCTATCTTTCTAAGTC
TTTGTGGCACACTTATCACATGCATAGTACTATTTCTCAAGTTAC
CCAGGCACACACAGATGTATGGCTTTCAGGAAGCCATACATCTGT
GTAGCTCTGAGGCCCAGCCTTGTTCAACACTTCACTCAGAAGAAT
TGCTGGCCTGATGACCAACAATAATTGTCAACAACTTAAAACTTC
ATTGACGGCTCCTAAAAAAAATCAGTGTGCATGTGTGTGTGTATG
TGTGTGTGCGTGTGTGTGTGTGTGTGTGTATGAGTGTGTGTATAA
CATTCATTACTGCAAACTGGAATGGAGTGGGGCTGGAAGGCAGCC
CAGAAGCAAGGCTCAGAGCCTGGAGCTGCTGACCTCTTGGGGACA
CTGCAGCCCTGGCCTGGCCTACTTTTCTCTTCTCCCATATCTGGA
AAATGAAAGTAGCCTGACGTATCCGGGGACCCGGCCCAAGACTCC
ACCC

[0901] In some embodiments, the intronic domain that promotes trans-splicing primarily in the heart comprises or consists of sequences from the gene IL1R1. In some embodiments, the sequences from gene IL1R1 comprise or consist of:

(SEQ ID NO: 842)
TAAGGTTTTAAAGGGCCCGCCCTGGCTTCCTTGGGCCTGTAGTTT
GTGACTGTGTCGTTTTCAGAGTGGGAAGGCCCAGAGTTGGCCCCA
TGGAATTCTTTCTGCTTCTAGGGTGTTTGAAGAGATAGAAAGCCA
GGGTAAGGTTCACCGAACCTCCAAGCAAAAATAAATTTCCAGAAG
GGGCCCCTTTACTCTGAGGACATTGAATAGCAACAAAAACTACCA
CTGAAGAGTCATTTTGTCCCAGGCCCTGTGCTGGAAACTTTGAAC
ACCTGTGTTCACCCCTCCCTCATGACACTCATGAAGATATACCAT
GGCTGTCTTTATTTTCTAGGTGGGAATCTCAGGCTTGAGGGTTGG
GGTGGCTTGGGGAAGGTGTGTATCTAAGAGGTAGCTCTTATTTAT
TTTTACTTCTAGAGATTAAGACACATTCTTTTTCAAGATAGACAT
GGAACTGTCAAAAAGGATTAAAAGTTAAATAAGGATAAGGTTATG
TAAA

[0902] In some embodiments, the intronic domain that promotes trans-splicing primarily in the heart comprises or consists of sequences from the gene DBI. In some embodiments, the sequences from gene DBI comprise or consist of:

(SEQ ID NO: 843)
AGCGCGTGCACAGCCAGGCTGCGAAGGTGCAGCGGGCGGGAGGCC
CGTTGGGGGCTCAGCCGGCTGCCAGAAGCTCTCGGGCTCTTTCCT
TCCGTGCCCCTCACTTGCTCATGGGCCCATGCCTAGCCCTGATTC
GTTGGACAGAGCCTTGTGAGCGGGATTTTCCGTTTGGGGATTTCT
AAATCTGCTGCCCACCCCGCAACTGCCGGAAAGTTGCCCATGGGG
TGGACTTCGCTGTGTAGCGGGAGAGGGGTGGGAGTCGAGGGTGCT
TGATGGAGAGATGGGGGAAGGGGTTGCACGGATTGGAGGAGCGAG
GAGACTCAGTCCCCATCCCGAAGCACAGGGCAGGACGTCGCGGCG
GAGTGGGGAAGCGAGGAGTCCGTGGCCGAGAGCTTGGAGGTCAGG
GGAAGTACGGGGCCGGCTGCTCAGAGTGCGGGACGAGGAGAATCG
CGGCCCGGGGAGAGGTGACCCAGGGGCCCCTCCCTTCTCTCCAGT
GTAG

[0903] In some embodiments, the intronic domain that promotes trans-splicing primarily in the heart comprises or consists of sequences from the gene DBI. In some embodiments, the sequences from gene DBI comprise or consist of:

(SEQ ID NO: 844)
TCGGTGTTGAACGCGCGGGCCCCAGGGGGAGGGAGGGGACCAACG
GGCTCCGGCGCTGACACCGCGGCACTCATGCCCTGTCCCCTTTCA
GCTGTTTCCAGCATACTGTGCCCCGTCTGTCCTCAGGCCAGGGCT
TCGCTGCAGCCCCGGCCACTCCCTAGTGCCTGGCCCGGTGGTGGC
CAGGCAGTTGGCCGCGCTGCTTCTCCCGCAGAGGGGACCCCCACT
GGGGGCGAAGGCTTGGCCTGCCCTCTTCACTGCTGTATTTCCAGA
CCTGATGCCTGCGTTTGTGAGAGCTCTGGATATATGGTTTTCGAT
TGAATGAGTGAACTGGAGGGGCTTCCCCTTCTTGTGTTGCTGAAT
CTTTCTAGCTGCCCTGTTGGGGCAGGGAGGGGCAGACACACTTCA
GGGGCTGCATTGCCCGAAGGGTGCCACCTTTCCCACCTCTCCATC
CCCGTAACTGGGCTGTCATCAGGCCACAGTAGGATTCTTACCCTC
TCCC

[0904] In some embodiments, the intronic domain that promotes trans-splicing primarily in the heart comprises or consists of sequences from the gene HNMT. In some embodiments, the sequences from gene HNMT comprise or consist of:

(SEQ ID NO: 845)
TCCCTAGAGTTGACTATTGCCTTGATTTTGGTTTCTTTTCTTAGT
TCTCCATGTACCTATTACTATTTTGATCCCCAAGCAGATATATTA
ATCTCCTCTCAATATATGCAAACATATCAAGGAATCTGTTTATTT
TACCCCAAGGGAACAACTTTTCTGAAGCCCTCTGTTCTTTTTTTC
AGTTTAGGAAGATCTGCTTTGGCCTGCTATACAACTATTAAGGAG
GGAATTTATTTCACTTTCTGAGAATCATTTTCTTTCTCCATTATT
TGATTCCCTGATTCTATATCTCATGCCTTTCTTTTCTTTGTTTCC
TCGGTCCTTTGTTTCCTGAACAATTCTTTAAGAACTTTAAGAGTG
AACGAGAGGTAAACTTTTTGAGACTTTGTATGTTTAAAAATCCCT
TGGTTCTATGTTAATCGTTTGACTGGATATAGAACTCTATACTGA
AAATGGTTTTGTATAATAGATCTAAAGGTACTTTTCCACTGTCTT
TTAG

[0905] In some embodiments, the intronic domain that promotes trans-splicing primarily in the heart comprises or consists of sequences from the gene HNMT. In some embodiments, the sequences from gene HNMT comprise or consist of:

(SEQ ID NO: 846)
CCTTGGCATGTGGAATAACTTTTACATTGCTATGTGTTTTGTTTT
CCCTATTTTGAACTTTTTAGAATCTTCTTACGTCTAGTATTCTGA
AATTTTAAAATACTGAGCTGTGAAATGGTTCCTTTTTACCCATTT
TATGGGTACTCCCTGGGCTATTTCAATTGAGATTCAGATCCTTCA
GTTATGCGGAACTTTGGTAATCATTCTTCACCACTGTTTTCTTTT
TCTGGAACTTTTATTCATCAAATACTTCCTGGATTGATTACCTAA
TTTTCTTATATTTCCAGTTTGCTACAACTTTCCTCTTTCAGCCCA
TGTATTAACTTTTTACTATTATATTTTTAATTTCCAAGAATGTTT
TCTATAGCATTCTTTTCATCATTCCCAGATGTAATACCTTCTTAT
TCATTACAAAATGTTCCTCTGCTCTCTCTGCCTCTTTCCATCTCT
GTTTCTTATGTTAGACAGCTCCCCAACCACCTAAAGAGCCTTGGT
TTTC

[0906] In some embodiments, the intronic domain that promotes trans-splicing primarily in the heart comprises or consists of sequences from the gene KYNU. In some embodiments, the sequences from gene KYNU comprise or consist of:

(SEQ ID NO: 847)
GATCTGCCCACCTTGGCATCCCAAAGTGCCAGGATTACAGGCGTG
AGCCACACACCCGGCATGTTTTCTTTTTTTGGAAACAATAACAGG
ATATCAGATTGATAAATGCAATACCAATTTCTGATAATTTATCTT
GCTATATAATACTTCATGGACTTCTTGCACTTTGTGGTGTTTTAT
TAGTCAGGAATAAGGAGAAAACAACTTATAGCTGTGGAAAGAGTA
CAAATTAATTTTTAAAAACTGGAGAATAAATCAAGCAATTCGGCT
TTTGAAGACTTTCACTTGAAAAAACACTTTTTACTTTTTAATTAT
CATTTCTTAATAATAAAAATTATGCTCAAATGCTGCTCTTATGCC
AGATTTTTAAAGAACCTTAATCTGAAAAAAAAAACTATTTTATAA
TGCAAAAGGGCTCACGGTGAAATTTAGATCGGCAATATGAAATTA
CAAATTTATTATTATCGATATGACCTAACTTGTGCCTAACTTGAT
TTAG

[0907] In some embodiments, the intronic domain that promotes trans-splicing primarily in the heart comprises or consists of sequences from the gene KYNU. In some embodiments, the sequences from gene KYNU comprise or consist of:

(SEQ ID NO: 848)
TATGCACGCCATTTACTTCTTCCCACCTTACTCCAAACATCACTC
TACTTAAGAGTGTTCTAATTGCATGACTTGTGAAGTACTTTAGCT
TGTGTCTGAGTAAAACTATTTCAAAAGTTAAAAAAAAAAAGAGTA
AACCTTGGGCCAGGCACGGTGGCTCACGCCTGTAATCCCAGCACT
TGGGAGGCTGGAGCAGGGGGATCACGAGGTCAGGAGTTTGAGACC
AGCCTGACAAAAATGGCGAAACCCCATCTCTACTGAAAATACAAA
AATTAGCTGGGCATGGTGGTGGGCACCTGTAATCCCAGCTATTCG
GGAGGCTGAGGCAGAAGAGTCACTTGAACTCGGGCGGTGGAGATT
GCAGTGAGCCAAGATCGTGCCCCTGCACTCCAGCCTGGGCAACAG
AGCAAGACTCCATCTCAAAAAAAAAAAAGCGAGTAAATCTTACAT
TTTTAAAAGAAAATCTGTAATCTTTTTTGCTTCAGGCATCTCTAT
TTAA

[0908] In some embodiments, the intronic domain that promotes trans-splicing primarily in the heart comprises or consists of sequences from the gene GRB14. In some embodiments, the sequences from gene GRB14 comprise or consist of:

(SEQ ID NO: 849)
GTAAGTTTGGTATTTTTAATTTTGAGTACTTGTGAATTGGATTTC
TCCTATAAGCAGAAATTATTTATTCCATAGCCACAAAGAGTTCTT
GATTTGGGCTTATCATAAAACAGAAGTGACATTGTTCTATAAATG
AGGTCATCACTGTATTCTAACAGTATCTATATTATACCTGGTACA
TAGTGTGTGTCTGGTATTTGTATATAAATGGACAAATAACGGAAT
AGAGTATCTTGTTCTTAACCAGTGATCACTAATATTACCCATTAT
GTCCTGATTCTAGCATCTCAGATATCAATTGATGGGGGAAAATGA
ACTTCTTTTTAAGTGTCAATATTTTGATTTGAACATATGATTTCG
AAGTATGGTTTATATTATGACATTATGTCAAATGTATTTTTTTAG
GTATGATGCAACATGTATTAAGTAAAAAGCTGTTTCTTAAGTGTT
TTGAACACTTATTTTTTTGTGTGTTTACATCCCTATTGTCCTTTC
TCTA

[0909] In some embodiments, the intronic domain that promotes trans-splicing primarily in the heart comprises or consists of sequences from the gene GRB14. In some embodiments, the sequences from gene GRB14 comprise or consist of:

(SEQ ID NO: 850)
AAAAACACTGAGAGAAAAACACTGAAATTGAAAAACACTTTCAAT
TTATTTGAAAGATAACTTTCAAAGAAATTTTCATAACTCAAATGT
GTTTCTTTTTTCCAGAGAAGTATATCAGAGAATTCCCTGGTAGCA
ATGGACTTCTCAGGCCAGAAAAGCAGAGTTATAGAAAATCCCACT
GAAGCCCTTTCAGTTGCGGTTGAAGAAGGACTCGCTTGGAGGGTA
CAAGTAGCTTCACATGCTTCAAAATATTTATGATTTCAGTTTGTT
TCACCTAAAAACTTGAGATTTGTTTTCTCCTTCCTTGCTCAGAAA
AAAGGATGTTTACGCCTGGGCACTCACGGTAGCCCCACTGCCTCT
TCACAGAGCTCTGCCACAAACATGGGTATGTCTGTTCATAGTCAT
TGCCACTGAGTAGACGGATAGACATGGAAAGGACATGTAATGAAA
TTGCAGTCATCTCAAACAAAGCTTTGCATTCATCCATCCTATTTC
TTTA

[0910] In some embodiments, the intronic domain that promotes trans-splicing primarily in the heart comprises or consists of sequences from the gene SPATS2L. In some embodiments, the sequences from gene SPATS2L comprise or consist of:

(SEQ ID NO: 851)
TCAGAAACAGTTATTGGTATTGCCAAAAAAAAAAAAAAAAAAGGA
AGCTAAGAAGTCACCCTTCTAAATAAATAAATAAATAAATAAATA
AATAAAAACCTGAATTGGAGAGCTGCCTGCATTTCACTCTACTGC
CTCTGGAAGAAGAGTGTTATCTAAAGTGCTTCCATCATGAATAAT
GATTGAGAAACTGCTTTTACTCTCCCGACTACTGTACTCCCAGGC
AGAAACCCACGGCTGAAGCCCACGATGCCCATGTGTAACTTGGTT
ATTACACACACGTTTGGAGCCCAGTGTGCAGACCCGCAGCGCAGA
GGAGGCGGCGGAACACCCCGGGTTGGTCGGGTTTCCAAGGGCTGA
CCCGAGCTCCAGCACTTTTTCCGCGCCTGATTTTTCAGGTCATTT
TCGAATGGGCTATCTTTGCTTACATTTTGAGCTTGGATCCTCTCC
AGAAAGCATTACTACCTTCTAAAAGGAAAAACATCTCGTATTTGC
AGAC

[0911] In some embodiments, the intronic domain that promotes trans-splicing primarily in the heart comprises or consists of sequences from the gene SPATS2L. In some embodiments, the sequences from gene SPATS2L comprise or consist of:

(SEQ ID NO: 852)
TAGGAGAAGATGATTCTCTTGCAACACGTGCGGATTGTGACAAAA
TCTTTCATTAACAAGGGGAGTTTCGGTGAAGTGGAGGTTTGGGGA
AAGGCGAGGAAGTCGGTCTGGAGCAAGCAAGCAAAGTGCGGAAGC
TGTACTGGGATTCTTCTAGAAAGTGGGGTGGGAAAGGAGCTAGGG
AGGGCGTGTGGAGGGACGAGATCTGTGTCAGAACGTGCGTGTGAG
CGGATACAAAACCCGAGAGAGGCGTGAGCAGCGCTGTGTTTGCGA
GCGGGAGCGAGGGGCGCCGGCTGGGGTGTGTGCTCCTGGTGAGTG
ACACCGAGGGGAAGGCGGGCGGGTCGGCGGGCGGGGGCAGCCTGC
GAGGGGCGGGAGTGTCCCTGCGTGGGGCGGCCGAGCCGGAGTTGT
GTCAGTGAAGGAATCCAGTCCGGGGGCCGAGCTGGCTGCGCCCTC
CGCTGCAAGCGCCGGCAGCGCGGGGCGAGCTCCGGACGGCGCGCG
GCCC

[0912] In some embodiments, the intronic domain that promotes trans-splicing primarily in the heart comprises or consists of sequences from the gene CPS1. In some embodiments, the sequences from gene CPS1 comprise or consist of:

(SEQ ID NO: 853)
AGGGCTGAGGATCGCTCCATCTTCTCAGCTGTCTTGGATGAGCTG
AAGGTGGCTCAGGCACCTTGGAAAGCTGTTAATACTTTGGTAAGG
AGAGAAACAAGTATCTGTTTCTAATGTTCTATTTTGAAGAGCTGC
AACCTGAATGTTGACTGAATGTTGACTATTGGATATGTTAACTAC
AGGGCAGATAGAATGCATACACTTAGTGAATTTAAAGTTGTTGTA
TATCCATGATTGCAGTTAATGCTGATTATGAGTTGATAGCAGTAT
TCTCATTAAGATTCAGACAATGAAAATAATTTCAAACCAGTTTTG
AACAAGATTTGATATTTAGAATCAGAAGCTAGGAATTTTATGTAT
TTCAGTGTCCAATTTACATTTAATGGTGCCTTTAGAGAATAAAGA
AGCTGGGCTACCACTCGAGCTAATGATACATTCTGTAATTTTATT
GCATATTTTAAACTACTCATACATTTTTATTGTTGTTTCTATTAA
TTAG

[0913] In some embodiments, the intronic domain that promotes trans-splicing primarily in the heart comprises or consists of sequences from the gene CPS1. In some embodiments, the sequences from gene CPS1 comprise or consist of:

(SEQ ID NO: 854)
TAACACTGTATATTGTTTTCCAAAACAATGATTCAAAAATTGGGA
GATACAGAAATGCATGCTGTATGCTAATAGCACTAGGGTTCTATA
TGTAGTAATTTATAAATCCATTAACAATTTCCAAACCATCACAGC
CAGTTTAAGGACCAATGTGTGGTCTTCTAGTTTAATGCTTTCCCT
TCAGGGAGTGGCCATAGGAAGACTACAGTTCTTCATCTAGAAGTG
TAGTGTAAGGCATCTCCTTACCAAACAGAGAGGGTAGCTTTATAT
TAAAGAACAGGACAATTTAAAAAAGACACACAAATTGAGGTATCT
CTCGCCAGCGTGTTTTCTGATACCCAGAAATGACAGCTTATCTTT
GACTATTGTCAGCACCTTCTGATAGTGCCTTTGTTTTAAAATTTT
CAGTTTTTGAGATCCGATTGTTTAATAGATAAATTATAAGGGTGA
GGAACAGGAACAGTGAGGATCTTTTATATTAAACTTTAAAACAAA
GTTT

[0914] In some embodiments, the intronic domain that promotes trans-splicing primarily in the heart comprises or consists of sequences from the gene PECR. In some embodiments, the sequences from gene PECR comprise or consist of:

(SEQ ID NO: 855)
GTAGGTAAACGATCTATATTGAAATTTATTGACAAATTATGCTTT
CTGATTCCATTTGTGATGTTGATAGAGGTATTTGGTAATAAGCAA
GTATAGCATAAAAGATTGACTTTAAAACATAGATAAAATGGAAAG
CCTAATTTTCTTTTTTTTTTTTTTTTTTTTTTGAGATGGAGTCTC
TGTCGCCCAGGCCGGAGTGCAGTGGCATGATCGTGGCTCACTATA
ACTTCCACCTCCAAGGCTCAAGTGATTCTTGTGCCTCAGCCTCCT
AAGTAGCTGGGACTACAGGCACAAGCCACCATGCCCAGCTAATTT
TTTGGATTTTAGTAGAGATGGGTTTTCACCATATTGCCCTGGGTG
GTCTCGAACTCCTGAGCTCAGGAGATCTGTTCGCCATGGCCTCTC
AAAGTGCTGGGATTACAGATGTGAGCCACCGCACCCGGCCCAGAA
GGTCTAATTATCATTATGGAAGTACTCTTTGATTTACAGCCAGAT
TGTC

[0915] In some embodiments, the intronic domain that promotes trans-splicing primarily in the heart comprises or consists of sequences from the gene PECR. In some embodiments, the sequences from gene PECR comprise or consist of:

(SEQ ID NO: 856)
CCCGGTAATTTTTGTATTTTTAGTAGAGATGGGGTTTCACCATGT
TGGCCAGGCTGGTCTTGAACTCTTGACCTCAGGTGATCCGCCCGC
CTTGGCCTCCCAAAGTGCTAGGATTATAGGTGTGAGCCACTGCAC
CTGGCCTCCTTTGTTATTTAAAATCGATGTTAAAAATAACCACAG
GCTTGAAATCCTTAAAATTACCAATGTGTTTTCCTTTGTAATCAA
AGTTCTTTAAAGTATTCCTCTTACGTAGTGATTTGGGGAGCCTTA
TCTGGGTCTATGCCATGTGAGATTTGCTTGATCATCAGCTGTGGC
TTGGATTTAATATTGAAGGACATAGTTTTTTCTTCGTTGTTTAGA
CAGAAGCTCAACAAGACAGACTCCATAGCAAGAAGTCTCTTGTGG
AATTCTGTCAGGTAGTTGGCACACTTGTGAGCTTGATGAACAAGA
GAAATATTCAACAGAAGCTGATTGTCATGTTTATGTTTTGTCTTT
CAAA

[0916] In some embodiments, the intronic domain that promotes trans-splicing primarily in the heart comprises or consists of sequences from the gene SP100. In some embodiments, the sequences from gene SP100 comprise or consist of:

(SEQ ID NO: 857)
GTAGTTATTTTCAAATCTTTTCGAAAGGAAAGAAGGAAGGAAGGA
AAGAAAGACGCAGGAATATGTATAAAGGTATAGCAAACATCACAC
TTAATGGTGCTGCTAAGTGCTTCTTCCTTGAAATTGGAAATAAGG
CAAGGAAGTCCACTCTCATCACTTCTCTTCAACATTGTATTCAAA
CTCCTAACCAGTGAAATGAGACCAAAAAATAGAAATAATTGTTTG
GAAAGAAACAGTAAGTCAGTCTATTTGTTCATGATATAATTATTT
TCTTTAAAATACAAAGGAAATCTATAAATAATTTACTAGAAATAC
TACATGAATTTAGCAATGCCATAAATTCATGGTTAATATGTTTCA
AACCAATTATATTTTCATATAATAGTAATAAGGAATTTGAAAAGC
ATTATCATTTAAAGTAACACCAAAACAATAAAATAACTAGGAATA
AATTTATTATTTTTTAAATTTAATTAAATTAAATTTTTTATTTCA
ATAG

[0917] In some embodiments, the intronic domain that promotes trans-splicing primarily in the heart comprises or consists of sequences from the gene SP100. In some embodiments, the sequences from gene SP100 comprise or consist of:

(SEQ ID NO: 858)
TAAGTAAATGGAGAGATATACAATGTTAACAGATTGGAAGCTCAA
TGTTGTTGTCATCTCCCCCAAATTTATCTGTAGCTTCAATTCAAA
TCCAAAAAAAAGTCCTAAAGTTTTTTCTTGAAGAAATTGACAAAC
TGATTTGAAAAGATAATGTATAAAAGCAAAGAATCTAGAAAATCC
AAGCCAATCTTTTCTAATTGACTTCAAGACTTTTGTTAAGCCATG
ATATTTAAGGCAAAATCTTACCAGCATAAGGGTAGACAAATAGAT
CAATGGTATAGCATAGAAAGTACATATATAAACCCATGCTAATAT
TGTAAATTGTTTTTTGAATATTTTCATGACCTTGGAGTAGGCAAA
TATTTCTTAGATAGTACACTAAAGTCATTAATTATAAAAGAAAAA
AAAATAAATTGGATTTCATCAAAATTACAGATTTCTTCCCATCAA
AAGACATGATTAAGAAAATGAAAGAGAAGCTACAGACTGGGTGAA
AATA

[0918] In some embodiments, the intronic domain that promotes trans-splicing primarily in the heart comprises or consists of sequences from the gene TRPM8. In some embodiments, the sequences from gene TRPM8 comprise or consist of:

(SEQ ID NO: 859)
CTTACTTTAAGGAAGGTCCCTGGAAGTTGTTCATTTCCTGCATAA
TAGTCCGTTGATTCTTGCATTTGCTGCACTTACGTTCTAGTTCAT
TAAAAGAATCTAGGCTGTTCCTTGGGGGACTCATCAAAAACCCAC
ATTTTTATGTTATTTCAGTTTTAATTCAGTTTTTAAAAATTTATG
CAGAAACCACTGAGCAAATAAAATGCTCAGAAACATTCTGGGTTT
TAACCTAGATTGAATGAGTTTGAATGAGTTGAGCCTTGATCATTC
AACCTTAGTCACGCAGCTCACACCGATAAACTGGTCAGAATACAC
ATCTTTAAGAGAAAAAAACATTCTCAGAGCTGCTTCTATAAAAAA
AAAAATCTCTCAACTTTGGTGGTATATTTGGATCTATTCCCAGTA
TATTCCCAGTATATTTTGAAGCAAACCATATCCTGCCTGAGAATG
GAAGTGGGAAATCTATTCTTAACACAGTGTTCTTTCTTTGTTTTT
ACAG

[0919] In some embodiments, the intronic domain that promotes trans-splicing primarily in the heart comprises or consists of sequences from the gene TRPM8. In some embodiments, the sequences from gene TRPM8 comprise or consist of:

(SEQ ID NO: 860)
GTGTTGCTTTTGTCATTTTATTGAGAGTGACAAAATAAAATTCCT
TAATTCGGTCAGATTCACTTCTATAGGGATTTGGTTCCCAGAGTT
ACATGAACTGACTTCTCTAAGCAGATGACTAGAGCATTCTGATTA
AATGCAAGCAAATGAATTCCCCCCTCTGGTTCTGGTTCTTGTCAA
CATGGCCAGATCTGAATTCTGTGGCCCACTTTTTGGTTTCCCCCA
AGTCAGGCATCCATCTGTAGCCCCGGGGACTCCAGATTCATTGAC
TCAGAGCCACCCCAATGTGTCATGGGGCTTTTTTGAGGCCTCATG
TGGGCTCACAAACAGGTGCTCCTGCTCTATGTTGGGGTCAACACG
AATGTTGATTGTCCACAAACCACTTGACAATGGAGCTTCGGGCCC
AGCAAAGGACATGATTCCCTTGTTGTAGGCATTGTCTCCAGAGTG
TTCCTGGGCCCTCCTGCTCCAAACACACATTCATTCCAGGAAGAA
TCTG

[0920] In some embodiments, the intronic domain that promotes trans-splicing primarily in the heart comprises or consists of sequences from the gene SEPT2. In some embodiments, the sequences from gene SEPT2 comprise or consist of:

(SEQ ID NO: 861)
AGTACATTCCTCACATTTGTGAACAGTTATGTTTCTAATTATATG
ATGTTCAAGTTCTGTAGTCTCATAGACCTGGATTCAAATCTTGGC
CCTGCTCTGGATAGTACTCTGACCTTGGGCAAATTAGAGTTTCTT
TGAGTACCCTCAAAGATCATACTGCAAACATAGTAGTACTGTAGG
TACTAAACACAGAATGATGTTTGTGAGGTACTTAGCCCAGTACCA
GGCCTTATGTAAACACTTAACCGATTGAATGGTGTCATATGAATA
AGGTCATGACAAGGTTTTTCTTTTTATTTAAAGGTGAATCAGGTC
TAGGAAAATCGACTCTCATAAACAGCCTATTCCTAACTGATCTGT
ACCCAGAAAGAGTCATACCTGGAGCAGCAGGTAAAAACATTCTTA
TGTTACTGTAAGTGTAATTCTACATGAAAGATGCTGAAGACTGCC
TAATTAATATTTTATGTCTTAGCTGTGTGTTTTGTTTGTTCTTGT
TCAG

[0921] In some embodiments, the intronic domain that promotes trans-splicing primarily in the heart comprises or consists of sequences from the gene SEPT2. In some embodiments, the sequences from gene SEPT2 comprise or consist of:

(SEQ ID NO: 862)
TAGGTGTGCTGCACCGAGGTCCTTGGATTTGGGTTGTAGACTTTC
TTTGACACGTATCCATGGATCCATCCTCTCTTGAGTTTGTCTGTA
AAATGTAATAAGTAGTTTCTGCCTATATTAAATATTTGATGGAAG
GATTAAGTGAGAATGTTTTACATCAAAAATGCTGTGTAACTAGAA
GATTACTAGGATAGATGTTCGAATTCATCTACTGTCAGAAAGTTC
CAGCACAGGACACCAGCATCCACAAATGACTGTTGAATGAAATAG
GCACACATAGTGAGAGCCTAAGACTTGGGCTGCTGCAAGAATATG
TAGCCCTTTCAGAATATTTTTGAATTCAGTTTTTAAATGAATTCG
TAAATTGCTTTCTTTTTCCCAGGAACAGAAATTATAATTTTTAAC
ATTTGTGTTTTTAACCTTCCCCAGTAGCACAATAATCTTAGCTTT
AACCTTCCCCTTTCTGACTTCTCTGGGATCTTTTTTTCTTAATCC
CCAT

[0922] In some embodiments, the intronic domain that promotes trans-splicing primarily in the heart comprises or consists of sequences from the gene RPL15. In some embodiments, the sequences from gene RPL15 comprise or consist of:

(SEQ ID NO: 863)
CAGAGACTCCGCAGGGGGAGAGCCCGCGGTGCGTGAAACAAACCT
GTTCTCTCCTCAGACCTCAAAGACAGCGGCTCCACCGCGGTACGC
GGCCACCGGCTTTGGAGCCTGGACCCCAACTTGCCTCCTCTCGCG
GAGAGACAGTCGCCGACGCTCGCTTAGCCGCCGAGACCTCGCCGC
CAACTCTCTCACCTCTCGAGACGCCCAGGCCGCTCAGGCTCGAAT
CTTGCGGAGCAGGGGGCGGGACAATAGCGGCCGCGGCGCCCCACT
CGGCAGAACTCCGCCACCAGGCGCGATGCCGGAACTACATGTCCC
ATGACGCTCTGGGAGGCCGCAGCTTTCCACCGGAAAGAGGGTGGC
TGAGGTGGGGGAGGAGCCCAAAAGGCATTGTGGGAGTACAGCTCT
TTCCTTTCCGTCTGGCGGCAGCCATCAGGTAGGCTGCGTTGAGGA
TCTTTGCTCTTCCATCCGCCTTTGATCGTCTTCCTCTTCAGCCAT
CCAG

[0923] In some embodiments, the intronic domain that promotes trans-splicing primarily in the heart comprises or consists of sequences from the gene RPL15. In some embodiments, the sequences from gene RPL15 comprise or consist of:

(SEQ ID NO: 864)
TCAGGATGCGGGACAGCAAAGGGGTGGAGAGGCGGCCCCCGGGGC
GGGTTGAGCGAAGATGTGATGGCGGCGCGAATTCGAGCTGGGCCC
GGATCCTGGAGGAGGCGTGGGGCTGACGAATGGGGCGCCCGGGAC
AAGGCAGCCTAAAGTGAGGCTGCTGGTTGGGTGGGGTAGATGCAT
TTTCCTCGAGAGTTAATCCTCGGTGGCCGCAGCAGTACCTTGTCC
TGTGATGTCAGCGGCATCTCCTTTCAGGTCCTCCTTGGGGACGCC
GCCTGCCGCAGCCACCCGCCCCCTTGGTGCTCAGTTCTGGTTCTG
TTAATTCGCCCCACCAAAACGTGCCGAGCACCGCTCTGTGCTGGG
GTTGCGGAAGTGACTGAACGCGGCTCCGTGGGCGCAGTGGTGGGG
GTTGGGCTAGCTGTCCCCGGCAGTTGGTGCAGAGCCATTTTCATT
CCCGGCGGTTTCCTTGTTTTTGTTGGGGAACTAAGATGGACGGAT
ACAG

[0924] In some embodiments, the intronic domain that promotes trans-splicing primarily in the heart comprises or consists of sequences from the gene AZ12. In some embodiments, the sequences from gene AZ12 comprise or consist of:

(SEQ ID NO: 865)
GTAACGAGCTCTTCTCTTAGGTTTTGGAGTCAGAGTTTGATTTGA
ATCCTACTCTACCCACTCTTCATTCAGTAATCAATATTTATTGAG
CAACTTCTACACAGTGATGAGTTGGGGACACAAATGATGGGCAAA
ACAGACAAAGCTTCTGCCCTCACAGAGCTTAACATTCTTCTAGAT
TTAACAGGGCTAATTCAACTTTCTAAGACCTACCTATAAAATATA
GATGATACATATTTCATAGAATTGTTCAGATAATTAAAAGAGATA
ATATTAAAAGAATGTAGTGCATTATAGTGGGACATATTGGACACT
CAAATGTTAATTAATTTGTCTTCTATTCTAAATATACAACAAACA
TAGCCAATTACTGGTATGGAAAGATAGAGTATGCATTAAGACTTC
TATAATATAATATTAATATGTTGTTGTAATGAATTATACTCAAAG
AACTTTTGAAAATTTATAAATTGAGAAGCTATGAAACTTGCTACT
AATA

[0925] In some embodiments, the intronic domain that promotes trans-splicing primarily in the heart comprises or consists of sequences from the gene AZ12. In some embodiments, the sequences from gene AZ12 comprise or consist of:

(SEQ ID NO: 866)
TATTCATGTGATCTGAAATAAGGCAAAAGAAATGTTAAAGGGATT
AGTTGACACAGGAGGGAGATTAGACATTTTGGAAGAAAGCAGGCA
TAGTGAAACACGGGTTGGAAACGTGGCTGTAGTTAAATTGCCTAT
GTTTACATCTCAACTCTCCACTTACTATGTTACTTTGGAAAAAAT
ACTTAAATTCCTCCTACCTCAGTTTCTTCATCTATAATGTTCTTG
AACAGTGACTGATATTAGTAAGTAACCAAATTTTATTTCAAGCAA
GGGATAGTTAAAAACTCACTTTCTAGTAATAATTACTGATCTAAG
ATACATGAAATTCAATTGATAATCTTTATTTAGAGTGCTATATTT
AGTTTTTTATTTTAAACTAAAAAATATTTAAAAGGACTTTTTAGG
TTCTCTTGCATGGTCTAAAGTCCCTCTTATTCTGTTTTTCCCAGG
AGGTCTTAAAAGGTTTTAGCCACAGTTTCTCCTTCCATCATGTTT
TTCA

[0926] In some embodiments, the intronic domain that promotes trans-splicing primarily in the heart comprises or consists of sequences from the gene IP6K2. In some embodiments, the sequences from gene IP6K2 comprise or consist of:

(SEQ ID NO: 867)
GTAAGAATCCATTAAAGAAATTAATTTTAAATGTGCATTACCTGG
TTACATAAAGGACTCTAGAACAACTTAGGTTCTTTTGGGACTGTT
GAAACATTGTCTTTAAGGACAGAATGTACTGGGTGCCTTTCTCTG
TACTCTGAATATGCATGTGTATTGCGGTGGGGATGGGGGAGTTGG
GGGCCCTCACTTGGTCCTTCTCTGTTGTTTTTTTCCAGGACAAAG
CCAAAGGCCCCTTGTTAGCTGGCCATCCCTGCCCCATTTTTTCCC
CTGGTCCTTTCCCCTGTGGCCACAGGGAAGTGTGGCCTGAATACC
CCACCCCGGCTCCTCTGCACCCAGAGCTGGGGGCCACCTCAGAAG
TGTCATCTCTCTCTGAGCACGCATTCCCCTGCAGCAGTCGAGGAC
TGAGCAGATTGAGTGATGCTGGGGCAGAGAGGCCTGGGAGGAAAG
GTGTTCAGCCAGTCGTTTGTAAGGCGCTCGTCGGCACCTGCTGAA
ACGC

[0927] In some embodiments, the intronic domain that promotes trans-splicing primarily in the heart comprises or consists of sequences from the gene IP6K2. In some embodiments, the sequences from gene IP6K2 comprise or consist of:

(SEQ ID NO: 868)
AAGGCCCTGGCAGCCATCCCTGGAGCCCTCACTCCCTCCCACTCT
GTGCTTTCCCTCCCTCTCCTCCTTCTCCTCCTCCTGGCCCTCAGC
CCAGCATCTCACACCCTCAGTTTTCAATCCCTGGTAAGATTGCTC
AATTCTGTTTTGTTGTGTGGATTTGAGTTTGATTTTGGTAGAAGT
GTAGTTGTGTTTTATGTTCAGGTGTCTCTTGATCACAGTAACCCA
TAGTCCCCCACTGGGGGGACGGTGGGGGAAGACTTTGGGAGGATT
TTACCCAGAATACTTGCCGCCTGCTTTTTGTCCTCCAGGAAACCA
GAAGCCCGGGTAATTAGGTAGGCCGGGGAGCAGCGTTGAGTCAGA
TGGAATGCAGGAGTGGGAGGCCTGTGCTGATTAGCCCAAGCCCTT
TGCTGTTACAGAATGTCCCCAAAATTGCTATATGAAAGCAACCCT
TCGATTCACATATGATAATTTTTTATTTCTTTTTATAATGTATTT
TATA

[0928] In some embodiments, the intronic domain that promotes trans-splicing primarily in the heart comprises or consists of sequences from the gene MST1. In some embodiments, the sequences from gene MST1 comprise or consist of:

(SEQ ID NO: 869)
GTGAGCACTAGTGACGCTTCCCCCATGACCCTGCCTCAGCCCCCA
CCCAAAGGCTGGCTCCCTTAACCCCAGTGAACTTTGTCTTTCAGC
TGATGACCAGCCGCCATCAATCCTGGACCCCCCAGGTTAGGAGTT
GGGCCAGTTATGGGTCAGGCCCTTTAGCCCACGACATCCACACAG
TCTGGGTTTCATCCAGCCCACCCCATCCTACAGACCAGGTGCAGT
TTGAGAAGTGTGGCAAGAGGGTGGATCGGCTGGATCAGCGGCGTT
CCAAGCTGCGCGTGGTTGGGGGCCATCCGGGCAACTCACCCTGGA
CAGTCAGCTTGCGGAATCGGTGAGGCACAACTGCCTGTCTCCCAC
AGAGAGGAGCTGAGGTTGTGTCCTCTGTGGTTATCCCACTGGGGG
CTGGGAATCTATCCCTGCCCCCAGAGGTCCTAGCCAGAAGATGGC
AGGTCTAGCATCTGTCCCAGGAGTCTGTTACCTGTCCTAATTCCC
CACT

[0929] In some embodiments, the intronic domain that promotes trans-splicing primarily in the heart comprises or consists of sequences from the gene MST1. In some embodiments, the sequences from gene MST1 comprise or consist of:

(SEQ ID NO: 870)
GGAGGCTGGCGGGCTAGGGCTGAGTGGAGCGCCTGCTTAGAGACC
TTCGGGAGAACTTCTGCCGGAACCCCGACGGCTCAGAGGCGCCCT
GGTGCTTCACACTGCGGCCCGGCATGCGCGCGGCCTTTTGCTACC
AGATCCGGCGTTGTACAGACGACGTGCGGCCCCAGGGTGAGGCCC
AAGCTTGGGGGCTACAGAGCCGGGCTGGAAGCCTGGAACCGGAGG
GCCGGGGCGAGGTCTCGGCCTGATGGCTGCCCGCACCCGCCACAG
ACTGCTACCACGGCGCAGGGGAGCAGTACCGCGGCACGGTCAGCA
AGACCCGCAAGGGTGTCCAGTGCCAGCGCTGGTCCGCTGAGACGC
CGCACAAGCCGCAGTGAGTCCCTGGTGCTCCCGGCCCCGCCAGGG
CCCTAACCCTGGGGCGGCATGCTTTGGTGTCTGGGACCAGAGCCT
GGAAATGGTTGAGACTACCCTGCCACGATTTTGCTCCCGCTTCCG
CCTA

[0930] In some embodiments, the intronic domain that promotes trans-splicing primarily in the heart comprises or consists of sequences from the gene ITIH3. In some embodiments, the sequences from gene ITIH3 comprise or consist of:

(SEQ ID NO: 871)
ACATCCCATTGCCACCAGCCCCATAAAGGGCTTCCCTGGACGTGC
CCGATTTCCAAAGCCTAATCTTTGTAGTCACATCTCCACCTCTAT
CTGCCAGTGTTGGGGCCCCTCTGGGGCCCAGCAGCGCTAAGACAG
GAGGAAGGCACGGGGCTGGGGGAGAAGGAACCCCTAGACCCTGCT
CACCACTGCCCTTCGGCTTTTCAGCCACACCGGTGAGCCCCGCCA
TGTCCTACCTGAGTGAGTACATGCTGGCAGCTGCCACTCCTCCCA
CTGCTTAGAGCCTGCCCCTGCCACATGTCCCTCCACCGTGGCTAC
TCACTCAGCTCTCCGGGATGGGCAGATGGACAATGTGCCCTGAGG
AGATTGCGGGGTGGGAGGGCAATGGCATTAGCGAGCGGGAAGGGG
AGGGGAGGGGCATAAGCTGAACTCCTATGGGGGTCGTCGGGCGCC
TCCCAGGGCCACTTGCTTAGCTCAGCCCTCTCTCCCTTTGTATCT
GCAG

[0931] In some embodiments, the intronic domain that promotes trans-splicing primarily in the heart comprises or consists of sequences from the gene ITIH3. In some embodiments, the sequences from gene ITIH3 comprise or consist of:

(SEQ ID NO: 872)
TGAGTCCCTGGCTGCTCCTCGGGAAGGCTCAGGGGCCTGGGCACG
TGCTCCTGCCTGTCTCGGAGTCGAGCCCATGGAGGCCAGAAGGCT
GGGGGAGGCCCCAGGTATGATGAGAGGCCCCGGGAGTCAGCTCCT
TCTCTAATGTGTCACCAGTGGACGGGGATCCCCACTTCATCATCC
AAATTCCGGAGAAAGACGATGCCCTCTGCTTCAACATCGATGAAG
CCCCAGGCACAGTGCTGCGCCTTATTCAGGATGCAGTCACAGGTG
AGGCTTGTGGGCTAGGGCCGGGGCCAGGGGGCTCTTCCTGGGAGG
GCTTGGGTCCCCCGAGGTAGGCACAGGGAACAGGTTCTCACTCTG
CCCAGTAAGGCATCATCTTCACATGCAAAGAAACCCCTGGGGGTG
GGGAGTGCCCAGGGCCACAGGCTTGCTCAGCCCCACATGCCAGTG
CTATTGGGAGATGATTAGCGTGAATGGACCACCTGGGCCTAGGGT
AGGA

[0932] In some embodiments, the intronic domain that promotes trans-splicing primarily in the heart comprises or consists of sequences from the gene ITIH4. In some embodiments, the sequences from gene ITIH4 comprise or consist of:

(SEQ ID NO: 873)
GTGACAAAGTAGGAGGTGGGGGGAGGGGAGATTGACAGATTGGGC
TCAGTCCTGGCTGTGGAGGGTAGTGCCTTGCCCAGCTCCTCTGGC
TGGTGACAGCCCTCGGGCCTCAGTTCAGTTGTATCTGATCAGGAC
TTGACCACACAGAGGCTTCCTTTTCTCCAAGAAGAGGATGGAATA
GACAAGGTAGTTTGAGGGTTTCTGCCAGGGGGAGGCATGACATCC
CTGGGGGGGAGCTTGAGGGAGGTCCATTATTGTTCATCTCCCAGC
TGTTGGGGGAGAGGCTCCCCAAGTTGGCCGGGTGTGGGGAGAGGG
GACATAGCTGCCCTCTCCGCACCCACTCCTGGGTGGATCTCAAGC
CCTGGCTGTGAAGACCCACACCCCACCTGAGAGAAGACTGCATCT
GTCGATTTCTCCAAAGCTGGAGCTGCTGGCTCCCGGATGAATTTC
AGACCTGGGGTTCTCAGCTCCAGGCAACTTGGACTCCCAGGACCT
CCTG

[0933] In some embodiments, the intronic domain that promotes trans-splicing primarily in the heart comprises or consists of sequences from the gene ITIH4. In some embodiments, the sequences from gene ITIH4 comprise or consist of:

(SEQ ID NO: 874)
TGAGGAAAGTGAAGCCGGGTCTCCTGTCTCCCCAAATTCATTGCA
CCTACGATATAGTCCAGGATTGGGTAGCAAGATTAAACACAAGCG
CTTCAAATTGATGAAAACCACCCTGACGGTGTCTGTCTGTGTCTC
TGTCTGTCTGTCTCTCTCTCTCTCTTTGTTTTATCCAGAAAGTAG
AAACAGGAATGTCCACTCAGGTAAGCAGCGAACATCCTCAAAGGC
TGTGCTGGGTGGTGGTCTGCTAACACAGGGTCCAGGGCACCAGCC
CTGTGAGGTTGCTGGCCAGGGCCCAGGTCCACCCAGGCCTCTCCA
GCCCATCCCTGCTGCCAGGAGGCAGTGTAATCTGACCCAGCATGC
TGGTGCATTTAGTCGCCTGTGCATTCAAATATTGGCTGTGCCTCA
GGCCCTGTCCCCAGCACTAAGAATACAGTCCCCATCCAAGTGGGG
CCACAGGAAGGTGGGTGCAAGATGCAAACCCAGGTCCCACTGATT
TCCA

[0934] In some embodiments, the intronic domain that promotes trans-splicing primarily in the heart comprises or consists of sequences from the gene IL17RB. In some embodiments, the sequences from gene IL17RB comprise or consist of:

(SEQ ID NO: 875)
TTTGTGTTAGAAGGGGAACATTTTAAAGAACCTGAGGAAAGTACC
ATGGACTGCATTCAGAGCTTTCTTTTGTTTATCTCCTTAGCATAG
CTACTCCTTAACCTGGGGTAGCCCAGTAAATACTCTAGGCCGTCC
TAAAAACCTAGAGTTAAACATTAGAGTGTGAAGGGGCCTCACATC
GGTCCCAAGTCATCCCCTGCTTGCAGCAGGGAAGGATGACATCCA
GAGACAGATGGAGACCCACCTGTGGTCTTCAAGTGAGGTTATGCA
CTGGCTTGAGGATCAGGTATACTGATGGCTAATCCATGGTCCGTC
ATAGCCTACAGTGGGACAGCTTAGTTCCCCCCTAAGCTGTGAAGC
AGAACCAGTTCATCTTTTCTTTGAAAGTTTGTCACTTGTATATGC
ATTTAAGGGGAAAATGGTGTTCTGCCTAATTTGGCAAAGGAAAGC
TTGTGGTTTGCCGGCTTCAACGTGACGCTTGGTTTTTTCTCTCCC
ACAG

[0935] In some embodiments, the intronic domain that promotes trans-splicing primarily in the heart comprises or consists of sequences from the gene IL17RB. In some embodiments, the sequences from gene IL17RB comprise or consist of:

(SEQ ID NO: 876)
TAGGTGCATTAGAGAATGGGTATTTGGGGCTTTACATTGAAAGCA
CAGTTGGACTTTTAGGAAGCCTAATATAGGCAATAGGTCATCGAA
GACCAGACACAGGGTGACCCATTGCTTTATTGGCTGATGCAGATG
AAGTCTCTGTCTGCTCGAAGCAGAACTCTGGGGCTCTGTGGGAAT
GAGGCCGTGTTTCAGACAGGCTAGCCTCTTGGCCAGTCAAGATGG
GACTTGCCATACAAGGTGGAAAGTGATGCCTGCCACTCTGCAGAG
GGAGATCAAGGCCGTGGAAGGAAGGTCACTTAGAGTTGGGACCGA
GAAGCAAATGTTTCATAGGAGAGCGGGTGTTTGAGATGGTGGCAT
TTGAAGAATGGGTAGGCTTCTGCCCAAAAAATGTGGGTAGGAAGA
GTGAGCTGGAGGAGAGATGGCACCAGCAAAGGTTAGGAGGTGGGA
AAGTGGGGGCTGTGTGGGCCAGCTGGCTGGAATCCAGGGCCAAAG
CCTG

[0936] In some embodiments, the intronic domain that promotes trans-splicing primarily in the heart comprises or consists of sequences from the gene DNASE1L3. In some embodiments, the sequences from gene DNASE1L3 comprise or consist of:

(SEQ ID NO: 877)
GTGAGGACTGCTGTGTCAGACGAATTCCCATCTAGCAGGGGCAGGCTCT
GGTCCCTGAGTGGGATGAGTACCTCTCCAGGGAGGGGGAGGAGGAAGGG
CATGTGCAGGCTACCACCACTTACAGCATTCTTTAAGGCCTTTCTTCAG
CCCTAAGTATCCCTTTTGCTAAATCTGCCTGGGTACCCTGCATGTGGGC
CTTGGGAATTGCCACACTTTCCCATTAATAACAGATGCCAACATTTACT
GAGTGAATAGCTAGTGCCAGGCACTGTGCTGAGACTTGACATGGACAAG
TTTATTTAATCCTCCCAATAATCCCTTGAGGTAGCTACAGTACCTTTCT
CATTCCCACTTTGCAATTGAGAAGTGTAAGGCATAGAGCAGTCAGGATT
GTTTCAGTTGCAAGGGACAGAATCTTAACATGGCTCATGAAAAAAAGGA
GCAATTGATTGGTTTGTGTAACTGAAATGTCCAGGAGTACTTCAGGCAT
AGCTGGATC

[0937] In some embodiments, the intronic domain that promotes trans-splicing primarily in the heart comprises or consists of sequences from the gene DNASE1L3. In some embodiments, the sequences from gene DNASE1L3 comprise or consist of:

(SEQ ID NO: 878)
CTGGAATGTGCCTGCGAGCTGGAATGTCCAGCACAAATATCTTGGTTAA
GGTACAAGGACATAGAATGTACTATGTGCCTGTGAGCATGTCTAACAGC
TACATAGGATAGAGCTTAACAAAGAGTTATTAGCACAAAGCAAGGAGAC
TTGAAGGAAGTTAGTCTTTAAAGGAAACTATTATTTCTAACACTTATGA
TTTATTCTTTAATAAGAAGGGAAACTTTGAAGAGGAAACTTTTTTACTT
TCTACAACAGTCTACCAGCTTTCTCTTAGCCATGAAGGGCAACTGGGAG
AAATGAGTCTTTCGTGTACTAAAAATAGGCAGCCTAATGACCCCAAGAT
CATTAAAATCTCGGCCACTGGCTGGACCCTCTGGGAACTGGGGACCCAG
ATAATGCAGCCTGTGCCTTCTGGAGGGGACAGCTGGTTTCCCTCCAGCA
GTGTTTATGAGACCTTGACAGGGGAAGTGTGTGACCCCCGCCTCTTTCC
TGTTTCTCA

[0938] In some embodiments, the intronic domain that promotes trans-splicing primarily in the heart comprises or consists of sequences from the gene MYLK. In some embodiments, the sequences from gene MYLK comprise or consist of:

(SEQ ID NO: 879)
GTGAGTGCCCCCAGGAGCTGCCCCTCCAGGCCATGCCCCCATCCCCACC
TTCCTCCTGGCCCCGGCAGCTCCAGCCCAGCAGCCCTAGATTGTTTGTG
TCCTGCAGCTGAGGCTGCCAAAGCCAGAAGGGAGAGCCTGGAAGGGGAA
TGAGGGAGGGAGAGCAGGGGAAGGAGGGGGTGATTTTTTTTTTTTTTTT
TTTTGCACACACCCTTATAAGGCTACTGAAGTCATTACCGATGTAATAA
ACCAACTAAGCAAGCGAGCGCCTCTCACCAATGTTCCCATCTATAAACA
CAGCCTGGCCGGCCTCCCCCATCCCCTCCCGCTCCCCTCTACCCTCCCA
CCCTCAGGGATTTGCTCTCCCCTGAAGTTTCTTTCTTACCCAGCCCCTT
TTCCTCCTGCTACTTTCCTTTTTCCCTACACTGGTTGCAGGGGGAGGGA
GCCTGCCAGCTGCGAGGACCTCTGTGGTGGAGGAGTTGGTGCTGATGGT
GGTGGTAGT

[0939] In some embodiments, the intronic domain that promotes trans-splicing primarily in the heart comprises or consists of sequences from the gene MYLK. In some embodiments, the sequences from gene MYLK comprise or consist of:

(SEQ ID NO: 880)
TGAGTGGGGGTTAAGGGTGCTTCCATTCCCGAGCAAGAGAGGGAAAGGA
ACTACTTCTGTGTTAAGGGATCATGGAGTCAGAGTCAAGGTCACTGGGC
AGGCCCACCACCAGGGCCTATCTGTCTAGACCAACCTGCTACATCACAG
TTCCCAGCAGGGTTAGCCTTTCTCCTTCCCCTTTTATTGGTTGAGTGAG
TGAGTGATTGATTGAATGATTATATTATATACTTACAGAAAAGTGTTCC
TATTTCTGGATGCCTGCCTTAGCTGTTGTCCAGACATTCTTTTTTTCTT
CTTCTTTTTAAATAAGAGCTGAGAAAATAAAGGGTGACCACACAGTGAG
AGGGTCCTGCCCTAAATCTAAGGCTGGGGTGAATGTCTCAGTCAAGCCG
GCGACTTCCATCTTCCCCGCTGGCCAGCAGCCTGTGATCAAGTCCACAC
TGAACAGGCCCTTTGCCCAGAGGGCCTCTTGATCTTTATTGATCTTTGG
AATTCTTCA

[0940] In some embodiments, the intronic domain that promotes trans-splicing primarily in the heart comprises or consists of sequences from the gene CDV3. In some embodiments, the sequences from gene CDV3 comprise or consist of:

(SEQ ID NO: 881)
TCGCCGCGCCCGGCAGCGTGAGCGCAGAGCCGGCCTCGACCCCGAGCTC
GGAGCCCCGCGGGCCGCGCCCGCCGCCGGCCCCACCCATCCGGGTCGAG
GAGGCCGAGGCCATGGCTGAGACGGAGGAGCGGAGCCTGGACAACTTCT
TTGCCAAGAGGGACAAGAAGAAGAAGAAGGAGCGGAGCAACCGGGCGGC
GAGTGCCGCGGGCGCAGCGGGCAGCGCCGGCGGAAGCAGTGGAGCCGCG
GGTGCGGCGGGCGGCGGGGCGGGCGCGGGGACCCGGCCGGGTGACGGCG
GGACCGCCAGCGCGGGGGCTGCGGGCCCAGGGGCCGCCACCAAGGCTGT
GACGAAGGTGAGGGGCCGGGAGGCCGGCACTCGGGGCCCGGGCCGCGCG
CCGGCGCCCCATGTGCCCGCCCCCGCCTGCCGGGGAAGCGTCCGGGAGG
GGCCGCGGAGGCCGGGCGGACGGGCGCGGGCCGCCACGTGACGCAGGCT
CTCCACCTC

[0941] In some embodiments, the intronic domain that promotes trans-splicing primarily in the heart comprises or consists of sequences from the gene CDV3. In some embodiments, the sequences from gene CDV3 comprise or consist of:

(SEQ ID NO: 882)
TCTGGGGCCGCAGTGCCCAGCACAGAGCAGCGTTTATCGGGTGACGTCT
AGGCTGAGTAATTCCGTGTGCTGACCTCAGCCCAGTAGTTTGAGCTGAA
TTTTCGCTTTCAGCAGCCGCATTTGTAGCAGCTCTTTTGTGATGACTTA
GTCTCTAAGCCCGTGAAAGAAAAAGAAAACTCTCGGTGGCAAGGTTGAA
GTAGAAATGTAGTTGTGAAATTCCTATTGACTTCTTCCTTCGGCTTTTC
TTAGTTGCTTAAAGTAACAGCTCCCATGCAGGAACCCAGCGGAAGTATA
GTGTTAGCCTACGAGCATGTTTGTCCTCCATTTAGCCTAGTTTGCCCCA
GAACGAAGCAAGGGCTTTGACCAGAAGACAAGTACATACTTAGTTTAGG
TTCCAGCCACTTGATCCACTTTTCGTAGTGTGTTATTTGCTTAGTTATA
TGTCTACAAATAGCTTTAATTGATCAAATGGCGTTTGTTTTACAGGACG
AAGATGAAT

[0942] In some embodiments, the intronic domain that promotes trans-splicing primarily in the heart comprises or consists of sequences from the gene PLSCR4. In some embodiments, the sequences from gene PLSCR4 comprise or consist of:

(SEQ ID NO: 883)
GTATGTATAATTTTTGTAGTGCTCAGCAGTATTTTAATCAGATGGAAAT
TTGCATTATCCAATATCTAGTTCCTTCTTTATATTGATCATGTTTTAGT
GGCTCAAAGAAAAAAAAACTGCTCTATTACCCTATCTTCAAGAAAGTAA
TAAAGTGAATTATTTTGTATAATTTTATCCTTCTATACATCATATAATC
ATAAGCTCTTAGATTTGAAAAGGGCTTACATTTTATCTGGTCAATAGCC
CTACACTTTACCCATTGTTCCTACTCCACATTTACCTTTCAAAGATGAG
TAAAAAAAGGAGCCAAGAGACTAAATGAGTTAGCCAGGGACACCACAGT
CAGCTAATCACCTCCAGATCAGGAAATAGCATTTAAACCACAGTCAGCT
AATCAGTGGCAGAGCTGGAAATAGAATCCAAATCTGCCAAATCGTAGTG
CAGTGCCCTCGCTTTGGAAGTAAGAAGAAAAGATCTCAGTCAAAATGAT
GCCTGTTCT

[0943] In some embodiments, the intronic domain that promotes trans-splicing primarily in the heart comprises or consists of sequences from the gene PLSCR4. In some embodiments, the sequences from gene PLSCR4 comprise or consist of:

(SEQ ID NO: 884)
TAAAATAATATAAAATGGGGACACTCCATGTGAGGTTCACCCTGGCTTG
TTTGTTCTCCTTAAGCCACTGAGAGACTTCCCTTTTCTATGGCTGGTCC
GTGTTAATCGTTCTGAACTTAACTAAACAACTACAGGCTATGGATGACA
TGTAGAGAGACCAGTGAGTAGGGACTTATCTAGGAACAATCTATAAGCA
CAGCTTCTTCTGATGTGATTACTACAGCAAGTAGATGTTTTGTTTTTCT
GATATAGCAGACAACTTTTTTAAAGTGGTACTGAAAGAAAGTGTTTTTC
TAATATGGACAACTCTGCTAATATCCATCCGATCAGATGCAGATAAGCT
AATTTCAGTTGGTAAAATTTTTTTGATTCTATTGACTTTCAAAAATATA
TTTTGGTATCAATTGATGCATTTTAATATCTATTTCATCAGTTTATTTT
ACAGTGGTATTTTAGTTCTGTTATTTCTGTCTTCTGATTGCTTTGTTTT
ATCCCAACA

[0944] In some embodiments, the intronic domain that promotes trans-splicing primarily in the heart comprises or consists of sequences from the gene BCHE. In some embodiments, the sequences from gene BCHE comprise or consist of:

(SEQ ID NO: 885)
GTGTGTCTGTTTTTAGTGTTTGGTTATTTAATAGATGATGGGTTATGTA
AAAAAGGGATGAAGTATACTCTCCAAGGCACGGTGATGGAGTTACTATA
TGTATCTCTGACTTTAAAATAACTTGGTTTAATGAACACATTATTTTTA
AGACTTTCTTCTATCAAGTTTAGATATGTTTTGAACTCTTACTATATGA
CCAGTACTTTAGTAGTTAAATAAAGAAAACTAAAATATAGATTTCACCC
TGTGGAAATATAAAATAGAAAAAGGAAACTAAAATAGAGCCCTACTTGT
TATTCAGATAATCTTTGTGGAATTAATTAATGGACAAAGAAATAAATAT
ATCAAATAATCATAATGTATGGAACTAAAAAATAAGATGCATAAATTGG
TAAAAACAGATTTATTGATAAATAATAGAACCTTGATTTAAATGGAGAA
AAAAACTCCGAAGTTTACATATTTAAAAACACAATAAAAAATTTCTAAA
TATTCTGAA

[0945] In some embodiments, the intronic domain that promotes trans-splicing primarily in the heart comprises or consists of sequences from the gene BCHE. In some embodiments, the sequences from gene BCHE comprise or consist of:

(SEQ ID NO: 886)
TTTCCTGGAGTAATGAGATTATTACATAATAAGATTTGTAATTAAACTT
GGTCTTAAACTCAAGCAGTATTAATAAGAGTATATAGAATGAAATAGAT
GCAAAAGATGAGTAAGTGATATGATTCCTTATTGTGAAATTTTTGGGCC
TAGGATAAGGGAAGATAATGAAACAAAAGTAACACCACCCTTTGAGCAC
GTTTAAGTGTGAATGAAGATATATTTTATTGAAATAAAAAATTTCTTCT
TCCAATATGTTAAGCAGAAATGCATATAAAAAATTCAACTTTAAATTTC
AATTCTTACAATTTTAAATAACATAGTGGTTCTCAGTGCTCAAACCACT
AAGCCCAGTTCACATACGTTTCATATCATCAATATATATCCACATTTTT
TCTGTCTTAAATTCTTTAAAGCTCTTGTGAACAGTGTTAGAAAACAATA
TTCTTTTTAATCTAACAATGATTTCAATTTTACTATAATGTCTCTATTT
TATTATTTA

[0946] In some embodiments, the intronic domain that promotes trans-splicing primarily in the heart comprises or consists of sequences from the gene MASP1. In some embodiments, the sequences from gene MASP1 comprise or consist of:

(SEQ ID NO: 887)
GTGAAGTTCACTTTATAACCTACAGACAGTGACACCTCAGCTCTGCACT
GGGCCTTCCTGCTCCGTATTGTTCCCTTAGGGATTTTGAGGCTTGGGTG
GGGGTTGGTGAGTGGGAAACTAGGAGCCCAGACCCACCTCCAAAGTTCA
ATGGGACTTTGAACCCCAGAAAGCTTGATTTGTTTGTTCTACATGTCAT
GGACTCTAGCCTCTAAACACGGTTAAGTTTTTCTGGTAGCTTATTAAAG
GCTTAGCTTATGAAAATTCTCCCAGAAAACAGCAAGTTTAGACACCCCC
ATGGTGACAATCCAGCTGTGCACCATGAGAACTGTACACCAAATTGGCC
AGAATGAGCCAGGCTCTTGAGAACCACAGTCCTTGCAGTAATGAACTTG
GCAGTTACACTTAGAAGTTCATATTCCTATCAGTTCAAGGAAAAAAAAA
AAAAACACTTAACTAAAAGTAAGGAGCCATAGTTTCAAGTCTTGGCTCC
CACTAACTT

[0947] In some embodiments, the intronic domain that promotes trans-splicing primarily in the heart comprises or consists of sequences from the gene MASP1. In some embodiments, the sequences from gene MASP1 comprise or consist of:

(SEQ ID NO: 888)
AAGGGGTTTTAGAGAATACCAAGTCCAGCCTCCTCATTTTATGGATAGG
AAAACAGAGGCTTAGAAGGGGAGCAGAGAGGAGGGCTGGCTAAAGGCAC
CATAGCACATAGTGGACTAGGCTGGGCTTTTTATTTATTCGCTGTTCTT
GATTGAGCACCTACTATGTGACAGCATTGCTATAGGCACTGTGATATAG
CAGTGACCAAGAATGAGATTCTGCTCTCATGGACCCTAGGTTTCAGACT
AGTTGAGGGTGGGACAGAATAGAAAACTAAACAAGTAAGCCAGTAACAC
ATCATAGAAACCAGTGCCCCTAGCTCTGCTGCAGGTAATCTGTAGCCCA
GCTGCCTTTCACGTCTTCCTCCCCACCACACCACCTTTCTCTGAGAAGA
ACAATCCAGTCTTTCCTCCACAGAAGAGGATGATGGAGCTGCAAGCTGC
ACCCCTCCAAACACCCCACAGATAGCTTCTCTGTTCTCACAGTATCTTC
TCTCCTCCA

[0948] In some embodiments, the intronic domain that promotes trans-splicing primarily in the heart comprises or consists of sequences from the gene IL1RAP. In some embodiments, the sequences from gene IL1RAP comprise or consist of:

(SEQ ID NO: 889)
AACCCAAAAGGACCTGGCCCCAGAAGCTTCTCTCTAAACTGATACAGCA
TCCTGGCTCAGAAGTTTAAGCAAAAGAGACATTTTGTTTTGAAGAGAGA
TCTATAAAAAGAAGCCAGTATTGGGATTTGGTCTAGACAATGGGATAGT
GTGTAGCGTAGATGGTATAGTATAGTGTTAGAATCTTACCATTAATACT
TTGTAATCACTGCATTATAGGTGGCTCAGCTTATCAACCTTCCTCGCCC
TCACCTGTAGTGGGGGTCTGTGGTTGCTTACTTGTCTGATTCCTACACA
GTCCATAGCTCTTGAGTCACTCTCAAATGCTTTGATTTTCTTCTCTCTA
TTTCTAGTATAAGTCATAGTAGAACAGAAGATGAAACAAGAACTCAGAT
TTTGAGCATCAAGAAAGTTACCTCTGAGGATCTCAAGCGCAGCTATGTC
TGTCATGCTAGAAGTGCCAAAGGCGAAGTTGCCAAAGCAGCCAAGGTGA
AGCAGAAAG

[0949] In some embodiments, the intronic domain that promotes trans-splicing primarily in the heart comprises or consists of sequences from the gene IL1RAP. In some embodiments, the sequences from gene IL1RAP comprise or consist of:

(SEQ ID NO: 890)
TCAGACTGTGTCTAAAACTTTCTTTGTGTCTCTCACCTAACACAGAATC
CCAGAAAATCCCTTCAAGGATGTTTTCAATGGTCTTGAGAAAAGTAATG
ATGAGTTATCACACATGAAATCATGAAATCAGGTCATTCAGAATCCTCC
TGGCTCCTAGTCTATAGAGTGTGTAATATTTCTTCAAAAGTGAATAACA
TAGCACATAATTGTTACATTTTACAGAGACTTAATGCTTTTTTAAAGCT
GATGAAAAACAGGATTCACCTCAAACTTTCATTACAACTTTAAAACTAA
ATAGCAAAGGCCTGAAATGTATATGCTGCGTATGAAGTACTAGTGAATC
AGTTCAGGGTAATTCATTGCTTCTGCTCCTCAGAAGCCAGTGTGAAAAG
GAAAGACTGAAGTACATGATGTAAGGCAGTTTCCCAAATTGAGTTCTCG
GGAACACTACTAAGAATCAGTATTGTCCTGCAATGCATTATTGTACTCT
AGAATCAGA

[0950] In some embodiments, the intronic domain that promotes trans-splicing primarily in the heart comprises or consists of sequences from the gene PI4K2B. In some embodiments, the sequences from gene PI4K2B comprise or consist of:

(SEQ ID NO: 891)
ATTTAGAATTCAAAGAAAGAGTCTTAACAACTAAAAAAAAAAAATGAAA
AAAAATTATTTATTGTATTTTATGTCATAAAAAGAATCTGGAAAAGTTC
AGATAAAATTGCACTGTTACTGAATAAGCAGGATAGGTTTAAAATTTGG
CCTCCATAATTAAATTCACCTTAATGAATATTTTTAGAAAAACGGCATT
CTTTTTCAGAGTGTCACCTTGAAGACATGTGTTTATTCTTTTTTTAAAT
TTTCCCAAAATAGCTGCTATGCTCCTTGAAAGTCTAGGGGTAAGCATTT
TTTATTTGCTATGTATTCTTTATGTGATTATTTAAAATTAGTGTATAAA
AATGGTTTTCTTGATAAATGTGGCTTATCTAAATTAGTGTTAAGTTTTC
TTATTGTGTTTACATGACATATTTTTTGACAGTACTGCTGAGAAATATA
AATATTAATCCCCTTGTTCTTGTACTTTCTTTTCTAACTATAGTTCTTA
AAATTATAG

[0951] In some embodiments, the intronic domain that promotes trans-splicing primarily in the heart comprises or consists of sequences from the gene PI4K2B. In some embodiments, the sequences from gene PI4K2B comprise or consist of:

(SEQ ID NO: 892)
TATTGAAGTTCTCTCATTTGTTCACGTAAATCTTGTTCATTTTCA
AACTATATTCTTGTTATCCAAATCAAAGCGGTAAACTTTTGTTGC
AGAAGTCTTGAAGCCACTTTCTCTGTCTGTCTTGGCAAACAGATG
TAGTATTGACTCTCCTGGGCAGAATTCATCCTGTGTGGGATAGAT
TCTGACTCATAGCAGGCTCCTAGATCAGTTCCTGTCCCCTAGGGA
GGAATTTCCTAGGGGCAGGGCAAAGTCAGATATTGGAAATGTTAT
CTGCATAATGTGAGTAATTAAGGCTTCATTGTATAAATTATGTTA
GGTGCTTATTTTGACATTATGTAACTCTTAGTGTAGTCTATAAAT
ACACTAAACTCTTAATTTTTCCTGTGCTATAAAGGAGCAATGACG
TAGACCAGGGATGTCCAGTCTTTTGGCTTCCCTGGGCCACACTGG
AAGAAGAATTGTCTTGGGCCACACATAAAAACAGTAACACTAATG
ACAG

[0952] In some embodiments, the intronic domain that promotes trans-splicing primarily in the heart comprises or consists of sequences from the gene SULT1B1. In some embodiments, the sequences from gene SULT1B1 comprise or consist of:

(SEQ ID NO: 893)
GTATACTCCAGACTCCATGTCAGTTTTTTAGTATGGCCCTATCCC
TTTACCCACTCACATAGTTTATTTTTTAAAATATTTTTTGTTTCT
TTAACCATATACTTGCAACAATCTATACTATACCCACTCACGTTG
TACGTAAATCTTCAAAAGCCATTAAGTTTTAGTCTGAGTTTATAT
ACTCAAGTTTTCCAAACTTGAGCAGCAACAGAATCCAAACCTCAG
CACAATATTACTACTTTTTTTTCCAACTCTCCCTAGATCTTCAGG
CCTTCTGTAAAAACTGAACTTAAGGACGTTAGTCCTTATTTGAAG
ATTTGGTATAATTCTTTGTTGTAACATTTGTTCCTGCTTATCTGC
TTTTGGGGAAATTTTATACTTCAAATTCTATTTATTTAATAGCTA
CAGTGCTATGTAGATTATGTGTTTTTTTCTTATCTGACTTTTGAC
AATTTGTGATGTGTGAGAAACTTTTCTAAGTTGTTGACTTTATGA
ATGA

[0953] In some embodiments, the intronic domain that promotes trans-splicing primarily in the heart comprises or consists of sequences from the gene SULT1B1. In some embodiments, the sequences from gene SULT1B1 comprise or consist of:

(SEQ ID NO: 894)
TAATGAAAATATAGATAAAACAGCTGATATTATATACAAAGTTAA
CATCATCTATGCTACAGTACCTAATACAACACGATAGCCAGTTTT
AGACTTACTAGTTATTGATACCTCTTTGGCATGAAGAAAACATTT
AAATAGTCATTTATAGCAATGCACAGGTATAATAAAACTCCAAAT
TATTAAAGAGGGTATTATTATCTCTCCTTTTGGAGATGGAGAAAG
TGAAGTACAGAGATTCTGAGATACTTTCAAAGTGTCTCACAATGC
TTAAGTGATAGAGTTAGCATTTGAACTCAGGGTGGCTAACCTCAG
AATGTGTATCCTTGAATGTTACACAATACTGACTCTAGTAATGTG
GTGAAATGCCTGTGATTGTTTCAGAATTTATCTGCATTACATAAT
GCTCAAAAATGTCTTGAAAAACTGGTTGGCAAAATAAGGAAACGT
AGCCTTTCTGGAGACTCTAATATTTCCCTATACTTAACTAAATTT
CTCA

[0954] In some embodiments, the intronic domain that promotes trans-splicing primarily in the heart comprises or consists of sequences from the gene CXCL2. In some embodiments, the sequences from gene CXCL2 comprise or consist of:

(SEQ ID NO: 895)
GTAAGTCTCGCCCATCGCTGCCGCTGCCACTGCTGGGGTCCCCGA
CTCTCCCGCTGCCCCAAACCCTGTCCTCAGCCCGACCTCCTGTCT
CACGAGATTCCCTTCTCTCTGCAGAGCCACACTCAAGAATGGGCA
GAAAGCTTGTCTCAACCCCGCATCGCCCATGGTTAAGAAAATCAT
CGAAAAGATGCTGAAAAAGTAAGTTATAATTTCCATGTACACAGG
CGACTGGAGCTGTTGGTCAGAAATACTGGCGTCTGCCCCCTAAAA
AGTAAATCAGGAAAACCCAGGGTTAGCTGCAGGACTGAAAAAATT
ATTATTTTCACAAAGTTGCCATTAAGGTTATTAATCTGTTCTGGT
GCCAGAGGATATTCCCAGTGCCCAGGGTCACCACCCAGGTTCTTC
CCTCCTGCCAGTGAATGTAGGTAAAACTGCTTTCATGTAAGGTCT
CATTGGAGTTTGCCAGTTGTGCTGAAGTGTTTTCCACCTGTTAAA
AAAC

[0955] In some embodiments, the intronic domain that promotes trans-splicing primarily in the heart comprises or consists of sequences from the gene CXCL2. In some embodiments, the sequences from gene CXCL2 comprise or consist of:

(SEQ ID NO: 896)
ATTCGGGGCAGAAAGAGAACATCCCACAGTTGGCGGGAGTTACGC
AAGACAGTCAGACCCGGACGTCACTCGTGAGTGCCCCGACCCCCC
TCCACCCCAGAGGCGGGGCCATCGCCTTCCTTCCGAACTCGGGAT
CGATCTGGAGCTCCGGGAATTTCCCTGGCCCGGGACTCCGGGCTT
TCCAGCCCCAACCATGCATAAAAGGGGTTCGCCGTTCTCGGAGAG
CCACAGAGCCCGGGCCACAGGCAGCTCCTTGCCAGCTCTCCTCCT
CGCACAGCCGCTCGAACCGCCTGCTGAGCCCCATGGCCCGCGCCA
CGCTCTCCGCCGCCCCCAGCAATCCCCGGCTCCTGCGGGTGGCGC
TGCTGCTCCTGCTCCTGGTGGCCGCCAGCCGGCGCGCAGCAGGTG
GGTCCCGGCGCCCTGGGGTCCCCGGGCCGGACGCGGCTGGGGTGG
GCGCCCCGCGCCGACAGCCCCGCTCAATCAGCGAGTCTCTTCTTC
CCTA

[0956] In some embodiments, the intronic domain that promotes trans-splicing primarily in the heart comprises or consists of sequences from the gene HSD17B13. In some embodiments, the sequences from gene HSD17B13 comprise or consist of:

(SEQ ID NO: 897)
GTAAGTACAGCACAGAACACCCAAATACTAAAACACCAATAGAGC
TTTTTTTTTTGCTTTTTTTTTTTTTAGACAGAGTCTCACTCTGTC
ACCCTGGCTGGATTGCGGTGGTTGCAGTGGCATGATCTTGGCTCA
CTGCAACCTCCGCCTCCTGGGTTCAAGCAATTCTCATGCCTCAGA
CCCCCAAGTAACTGGGATTATAGGTGTGTGCTGCCACACTACACC
CAGCTAATTTTTGTATTTTTTGATAGAGACAGGTTTCCCCATGTT
GGCCAGGCTGGACTCGAACTCCTGACCTCAAGTTATCCTCCTGTC
TCGGCCTCCCAAAGTGCTGGGATTACAGTCATGAGCCACCATGCC
TGGCCCAATAGAGCTATTATTATGGAGCATCTTTCAGTTGTGAAA
ATTGGCATGGAAACTCTCCATCCCTGGGGAGAACAGTTATTTCCT
CTGTTATTTTCCTACCCAGTCTATAAAAAGAGAGTGATTCATTTT
CTCT

[0957] In some embodiments, the intronic domain that promotes trans-splicing primarily in the heart comprises or consists of sequences from the gene HSD17B13. In some embodiments, the sequences from gene HSD17B13 comprise or consist of:

(SEQ ID NO: 898)
TTTACCCAGACCCTATTCAAGATGGAGTTGCTCTGATTTAAACGC
CTCTGACAAAATGACGACCTCAAAACAATCCAGCTTTATGGAATA
CCTCCACAAGAAAGAAAGTATACTTAGCTATAGAATTTTCTCCTT
GCATCCAACAGGCTTTGAGATGTCAGATGTTTCCTTCCTGTCCCA
TGATTAATCCTAGCCATTCCTCTTTCTTGTCTGGCTCCACTACTC
CTTACCATCTAATGCCTCGCCACCATTTTGATATTTTGACTAAGT
GAGCTATGAAACACACCTACTGGATATGAAAGTATAAGTTTCTGA
TAACAAAACATCAACATGGGATGTGGAGGAAGTGGGTAGGGTGGC
ATTAATGCAGCAAATCCTGGAATATTTTAAATCTTCATTCTAAAT
TTAGTAAAAATATAGGATAATTTTCCTGCCATCATTTACTTATAA
AATTAAAATTTTAGAAAATAAAAATAATATTTTCCTCTTTTTAAT
CACA

[0958] In some embodiments, the intronic domain that promotes trans-splicing primarily in the heart comprises or consists of sequences from the gene ADH4. In some embodiments, the sequences from gene ADH4 comprise or consist of:

(SEQ ID NO: 899)
GTCAGTTTTTTTTTTCTTCATAGCTTTAAATTCTTTTCCTAGTAG
TTCTGAAATTCTTAGAGTGAAGGTTATTGAAAAGAAATAAAAATA
ATTTATTCAACCATTGAATCCCTAGAGCATATCCAAATACTACAT
AAAAACTATTAATGACTTATAAATAATTTATATAAAAAGGTAATT
ATAATTTGCAAATTGAAATTTAATTTGCATTTGAATGAACCAACA
TGGAGGAACAAAAAATAAACATTGACCTTATTGAGATAATTTCTT
ATATAGAGTGGAAAATAATCTTAAATTTTTCTTATAAAGAAAAAT
TTTAAAATAGATATAAGTACAGAAAATTAAAGATGGAAGGAGTTT
AATCTATTTGAAGCAAACCAAATCTGACCTAATAATTTCATTCAT
TCAGCAAATGCTGATTAAACTACTTCGTGTCAAGTGCCATGTCTT
TATTTTGCATTTTGTCCACATTACAGGTTGGAAAAGTGTAGATTC
TATC

[0959] In some embodiments, the intronic domain that promotes trans-splicing primarily in the heart comprises or consists of sequences from the gene ADH4. In some embodiments, the sequences from gene ADH4 comprise or consist of:

(SEQ ID NO: 900)
TTTTTTTTTTTTTGAGACAGAGTCTCACTCTGTGACCCAGGCTGC
AGTGCAGTGGTGTGGTCTCGGCTCACTGCAACCTCCTCCTCCTCC
CGGGTTCAGGCAGTTCTCCAGTCTCAGCTTCCCGAGTAGCTGGGA
CTACAGGCAGGCACAACCACACCCAGCTAATTTTTGTATTTTTAG
TAGAGACGGGGTTTTGCCATGTTGGCCAGGCTGGTCTCGAACTCC
TGGCCTCAAGTGATCCACCCACCTTGGCCACCCAAAGTTCTAGGA
TTACAGGAATGAGTCACCTGCACCCGGACTGTGCTGAACATTCTA
TTTGTAATGGAACACTGGGCCCTCAAGGCTCAATCTACAATGATA
CTATGATGTCATTAGCTTGAATCCCATTATCTTACATGCAGAGTT
GGATTAATTTTTTTCTAAAGCATTGTACATTGCCACACTGGAGTT
CATATTCTACTTTTCCACTGACTCAAGTATTCTTTTATGCTCCAT
CACA

[0960] In some embodiments, the intronic domain that promotes trans-splicing primarily in the heart comprises or consists of sequences from the gene ADH6. In some embodiments, the sequences from gene ADH6 comprise or consist of:

(SEQ ID NO: 901)
TTTGAATGTCTTGTTATGGTGTAGCTCGTTGCAAAATTCACCTAA
TTTTATCACAAATGCAGGAACTTTTTTTCCTTCCTGTTAATATAC
AGTCAAACATATTACCAAGTACTGGAGACTATCTATATCACTGTA
TAACCATTCACTGTTGTTGCCAGCTTCAAGACCACATTTGAATCC
TATCAGGCCCAGTAAACTCTGTGAATAGACTCTGTGAACTGTCTC
TAAGTCTCACTGTTTTGTCCACATTAAGTGTCTTGTTTGAAGCAC
AAAGTAAAATCTTTCTTTCCAATCCCTGTCACTGCACCTCCCTAG
ACAGTCACTACATGGGGCAGTTTATGGACTTCAGCAATGTTTACC
TAACTCCAGATCCACACTATAGGAGTCCAGCCTTCAGGGAGAACT
AGTTTTTTACATTTTTTGCCTGCATAATGAGAAGCTTTAAGTTTT
TCATATTTTTACCTGAGAACAAGAATAATTACATTCTAGGCTATC
ACCC

[0961] In some embodiments, the intronic domain that promotes trans-splicing primarily in the heart comprises or consists of sequences from the gene ADH6. In some embodiments, the sequences from gene ADH6 comprise or consist of:

(SEQ ID NO: 902)
AAAATACATAATCCTGAAAGTATTTAAGTGTTCACCTACCGTTAC
TTTTGCCATTAGCATTGTATTTCCAATATGGATTTTTTTTTTACA
TGACATATTAATGGAAGTCAGCTTATAAAATTGTAGCTCAAGTTT
AAAAACATAAGAAGGTAGTTCACAAATAGGCCATTGTTGTATTTG
TTGTTCTACTTTGGGGGAGAAGAGGAATTATTCATAGGATTCCTA
ATTCTGAATCCTATCTTTGACCCAAAAAACAGAAACCAGCCATAA
CCCAGAAACTGGCATTCCCCACACGAGTATAAGCTTGCTTACCTA
CTTTTTACCCTTGGAGTTTCATGTCATTTTAAAAAATCTTCCCAT
GGCTTATTTAATCTTCTCATTTTTCACCTAAAGAGAAAAAAAATC
TAGTTTACTGCTCTACAAAGTGAGAATTTGAAATCCAAAACACAA
ATGTTGCTCTAAAAATGTTCCAACCTTTTTTCTCTTCTTCTTTTT
TTCA

[0962] In some embodiments, the intronic domain that promotes trans-splicing primarily in the heart comprises or consists of sequences from the gene ADH1A. In some embodiments, the sequences from gene ADH1A comprise or consist of:

(SEQ ID NO: 903)
TACTTGTGTCATCTTTGCCATTGAGAAAAGCTATTTCCTATGACT
TCCTGCATTTTTGGTATCTTCATAATCTTTAGTCATGGAATCCCA
GTGGAGGGGACCCTTCACTTGCCCTGAATATACACATGCTGGGCT
ATTGTGCTTGTAGTCTCCTGCATCTATCTCAATTTTCACTGTCGG
CATTTTCGCCTTTTTTTTTTTTTAATAAAATATACCGAATTCCTA
GGGTAAAAGCTGTAGTAGGGTAAAGGATATACTCATATTTACAAG
TGGTGAAAGTCCAAGAGTTGTAAATCCAGGAAATTTCTTAGGAAC
TCAAATAAAATGTCACATGTTTTCTTACAGTGAAGGAGAATGTTT
TTCTGACATTTATACTATGTCTTTATGGTCAATATACAATTGATT
TTTAAAAATAATAGCTGATTTCATGCTTCATATGACTAAGGTACA
ATTACTAATTGCAAAAACTGAACTATTCCTGGAATTATGTTCAAA
AAAT

[0963] In some embodiments, the intronic domain that promotes trans-splicing primarily in the heart comprises or consists of sequences from the gene ADH1A. In some embodiments, the sequences from gene ADH1A comprise or consist of:

(SEQ ID NO: 904)
ACTCTATACTAGATATGCGACCAGACCAAGTTACAAATCTTTCTA
AGTCTCAGTGTTTATAATCTCTAAAATCAAAATAATATGAAAATC
TACCTCCTAGTGTTGATGTTTAGGTTGAAGTTTAAGACAGAAAAT
GCATGAAGAATGTGACAAATAGCAAAAACTTATCACAAGTTATTA
TCCATTGTTGTTTTATATTCCTTATTATAACAGGAACGTGGGCAC
ACAACAATGATTTTTTGAAGATGCTAACGTAGTATTGAAGTCTAA
ATGACAGGCATACTCAGAATGTTGTGAGTGAGCTTAAAGTTGAAG
AAAACACAAGAGAAAACCAAAAAAGATGAGCTTTCCTTTGACTTC
ACTTGACCCGAATGCATGGGGGTGGGATTAGAGTGGCTGAGAACA
GACAGATTTTCACTAAGTCATTTCAAATGCTCCTTGGACTCTCAC
ATGGAAGCATGTCTAAATGCTAATACAATGTCTCTTCTTTCCTAT
TGCA

[0964] In some embodiments, the intronic domain that promotes trans-splicing primarily in the heart comprises or consists of sequences from the gene NDUFC1. In some embodiments, the sequences from gene NDUFC1 comprise or consist of:

(SEQ ID NO: 905)
GTAAGTGTTAAGAGATCTTTTCAACTGTAAAATATAATATGTCAC
CTTGGATGAGTAGCTGTCTTCTTTAAGCTTCATCTGTAAATTGAG
GCTTATAACCACGGCATGATATGTGCTCGTTTTGAAGATGAAATA
AGACAATGAATGTAAACCATATGATACATTAATGCACCGTGCCTG
GACCACAGAATTCAATCCAAATGCTAGTTATTATTCAGCACGACA
CTTTTCTTTCTTCTGGCTCATGTAGGAAAATTTTAATAAACCTCT
TGATGAATAGCCGTAGAGATGGGGTGAAAAACCCCCAGAGGACAG
AGAATAGGTAAACTCTTTTTTCTTTTAATTATTTTCTTCCTAATT
CCACTGTATAGACAGAAGGCTGAGGCCGGGGTGCTAGAGAACCTT
GCCGTGCTGGAATTCACGTTGACGCCCCCACGGAGCTCTGCTGCA
GAGCCCTCGAGTCCCGCACTTCCGGCCGCCAGGTGGCGCTGGTTC
TGTT

[0965] In some embodiments, the intronic domain that promotes trans-splicing primarily in the heart comprises or consists of sequences from the gene NDUFC1. In some embodiments, the sequences from gene NDUFC1 comprise or consist of:

(SEQ ID NO: 906)
TTTTGGTTTTAAAATTAATGACATAAAGTTTAAAGGATTAGTTTT
AAAGGGTCAAAATGTATTGTCTGTTACCTATAAATATTTTTACTG
GTCTTTAGACATCAGATTGAACTGAATTGAATGTACAAAGATCTG
GCTCAACTGTGCAAGATAAAACCTATTCCTCAGAACGATGTCTTT
AATAGGCAAAACCAAATAAATTGTTTACTACTACCAGACACTTGT
TTAAGCTTCTCAGCAACCCTATAGGTTTTATGTTACAGATGTAAA
ACTTAGGTATAGAGAGGTTAAGTAATTTGCCTAGAAATCATAGAG
CTAAAAAGTGGTGAGCAGAATGGCTTTGAACGCTGATTCTACAGC
TTATGGTCTAGGGTGGTCCAAGTCTGTTAGGTGGGCTAATGAGGA
TCACTAGATCTGGAGTCAGAAGACCTCAAACTGTATCCCACCTCT
GCCATCTGTGTGATCTTAAGCCTACCTAAGGCACTAATTCTACTT
CACA

[0966] In some embodiments, the intronic domain that promotes trans-splicing primarily in the heart comprises or consists of sequences from the gene SORBS2. In some embodiments, the sequences from gene SORBS2 comprise or consist of:

(SEQ ID NO: 907)
GTATAATATCACTAACTCACACAATGTCGCACTTGAATGGCTTCT
AGCTCTTCTGACTGTTTTTGTTCTAAACGTAAAAAGCAAAGGAAA
ATGAGATCTTGTAGGAAACATTTTAAATGTGTAATTAAAAACAGC
AGTCACTTGCCAAAAATAGGTTGAGTAACTGCGAGTGTTAATAAC
TATTCACGTTTTTGTTATCTCATGAACTTAAGTAGCATAATATTT
CATTAAGATAACTCAGAGGTTTTGGGGTTTTTTTTTTTAACCTAA
AAACTTTTGGGGTAGGGGTACAGGGGTACAGGATGAAAAAAGGGA
TTTGTAGGAAACTGAATCTTCATTAACTGGATTCTTTGTCAAAGG
TTGTGAACAGAATGATAGAACATTAGTTTTGAAAGAGACCTTTGC
TTTCCTTTAATCCAATCAGCAAATACCCTTCTACTATATATATTT
AAACATACCAAAATCTTGACCAATTAAGATTCACATGTACCCACA
GATA

[0967] In some embodiments, the intronic domain that promotes trans-splicing primarily in the heart comprises or consists of sequences from the gene SORBS2. In some embodiments, the sequences from gene SORBS2 comprise or consist of:

(SEQ ID NO: 908)
TTTACTGCAAGAATTATTCAAGCTCTCTTTGGGAATTATAACAGC
TAGAAGATGGTAAAACTTAAATGATATTAACTTAAAAGTATGTTG
TACCATAGCCTTTAATCCTGACATGGAGCTAATCCTTGACTCTAA
AAGCCAGATCCAGTGCTTATAGATTTAGTATAAATTGAATTTAAA
TGGTATAAACAAAGTTGAGTTCTGTGCCTGAGTTTTCACAAAGAA
AACCATAAAATGTTAAGTATTAAGTCTTCCATGCTTTCACTAAAA
CAGTGATACCTATTTCTAAGACAGATCCCTGGTCTTCTTTTGTTT
TGTTTCGTTTTGTTTGTTTTAGTTTGAGGGTGGTGTGAAATTGGC
AGGTGCATTCCATGATTACTAATTCTAACTGTTCATCTTTCTCAT
GGATGTCTGGCACATTTCTCTTAAAACGCATGATATTGCACGTGC
TTTTCCCGTTGCCTTGGCCTCTGCTATATCATTTTTTTGCTTCCA
GATA

[0968] In some embodiments, the intronic domain that promotes trans-splicing primarily in the heart comprises or consists of sequences from the gene KLKB1. In some embodiments, the sequences from gene KLKB1 comprise or consist of:

(SEQ ID NO: 909)
GATATGTACACAACTAAAACAAAACTAAGATATAAGATCATATTA
ATGTAATGATAATAAAAGTGGATTGTCTCCTGTTCTAATTTTAAT
AGGCACAAGGCATTTTTGTTAATCACTTCTTATTAAAGAATTTTT
TATAATATTCAGGAAAATACAACAAAAAAACCCTTACATTCCTAA
GGCCTCAGAGTCAGAGTAATATAAAGGAAATGTAAACACATGCTG
AGTAATGCAAGCATTTGGCAATGGTGGTGACTGGAGCTGGGAGCA
CAGCTTTTATTTCTCTGAAATAGGAATTTGCCCCTTAGAGTTAGA
CCAATTTTGCCTTCCTCTAAATGGCAAACAGTTTGGAGATACTTT
AAAGGACATTTTTTCACTTAGGATGTTTAGTACTATGAATAATAA
ATAGTCACAATTTCCTTAACTATGGTGACAAAATACAAGCAAATT
TAGCCTCATGTCATTTCCTAAGGAACATCTTCTCTCTGTGAGTTC
ACAG

[0969] In some embodiments, the intronic domain that promotes trans-splicing primarily in the heart comprises or consists of sequences from the gene KLKB1. In some embodiments, the sequences from gene KLKB1 comprise or consist of:

(SEQ ID NO: 910)
CGAGTATGCATGGAAAATCGCATCACAAAGGCGAGTATGCATGGG
GAGCACTTGCTGCTGTACTTTCATCACTTTTATAGTCTGAGTTCT
TAAAAGTTTCGTTCATTTCCCTCAAAACACTTGAACCTGCAGTTT
CAGTAGGTACTGTTCTGCCAGGTGCAGATTAGTTAAGAGATTAGC
AGACTTCTCTGCCTATCTTCTCTTACTTTAAAACAAATGTTACCA
TTGAATCAAGGAAGCAATAGCCATGAGAAAAAAGAAGGATCTGAC
GCCTTTGAATGAAGATTCAAAACATGATCTTCATGTTTTGTATTA
GCTTGGAGTAAAATCCACTTGCTGGCAATATAGCCCTTAAGCTTG
TTGCCTCTTCTCTTTGTTTCAGAAACTAGAGCCCTGTTTATTCTG
ATCAAGGCTCTGGCCCACTGTCTTTATCTCAGATAACCCACCCTC
TTCTGCACACAGCATGGAGCTAAGAGAAGGGTGTCTAGTTATGTA
ATAT

[0970] In some embodiments, the intronic domain that promotes trans-splicing primarily in the heart comprises or consists of sequences from the gene C6. In some embodiments, the sequences from gene C6 comprise or consist of:

(SEQ ID NO: 911)
GTAAGAGATACCCTACAGACTGTGTCTGGAAATTGGGAAAACCAG
TCTAGTGTAACCAATTTGATGGAAGAGCTGAGCTTTTTGAAGCAC
AGACATGAAATAAATGAATTTTCCACATAACTGATATTCCTGTGC
TCTGCTGAATTCCTCCTTCCCCATTGGGTAGCAAGTTTCTTAATT
ATCTCTCAGCCCAGTTCCCTGTTTAAAATGAGATTGTTCATTATA
ACAGTCTCATTTTGGTTTTAAAGACTTAACTTCTGCACATGTAAA
AACTTTAAACTCAGTTATATCAACACTTTCCTGTTCCTCTCACTC
AAGCCCAGGGCTTGGAGTGGGGTGGGGAAAACAGGCAAAAGAAAA
CTGGTTGGTGAGTGAACACACTACATTGGCTACGTGCCCCCTGTT
TTTTTCTGATCTTCATATAGAAATGCTTGCTTTCCTCTCTTGGGC
AGCCATCATTCAGAAGATCTCTGTGTGTTTGACACAGACTCCAAC
GATT

[0971] In some embodiments, the intronic domain that promotes trans-splicing primarily in the heart comprises or consists of sequences from the gene C6. In some embodiments, the sequences from gene C6 comprise or consist of:

(SEQ ID NO: 912)
AATCTTTCTAGCTACATCAATTTTTTATTATATGCTTCTCTTTGA
TAGCCCTAAGAAAGGCAACAATTCTATATTTATATTAGTGTGCTC
ATTTGATTAATGTCTGTCTGCACCCACAAGACTATAAGCTTGGTG
AGCACAGGATCTGGGTCAGTTTATGCTCAATCTACTCTCTCCAGA
ACCTTACAGAGTGATGAGAATATCATGTATACTCAATAAATATTT
GAAAAACAAATGAACAAAAATTTCAACAGTTCCATTTTCTTTAGT
TATCTGAACATAATCGCAATTTTAGGTTGGAAAATGACACCTCAT
GTGCACTGGAAAGGACCTTTCAGGTGGAATATTTAATGACAATGT
ATTTAGAGAAGCCAAAATGAATGATCTAACTCCAAGAGATAAATA
TGAATCCTTTACCACTGCCTCTTCTCTGAATTCAAGCTTATCACT
TAGAATCCATGCTGTGCACTGTTCTTTTCTCCTTTTTTTTTTGTT
TCA

[0972] In some embodiments, the intronic domain that promotes trans-splicing primarily in the heart comprises or consists of sequences from the gene MRPS27. In some embodiments, the sequences from gene MRPS27 comprise or consist of:

(SEQ ID NO: 913)
GCAAGTGCCCATTCCAGAGACTCACTCACCTGACATATTACTACT
GGAAGTTGAAAAGTCCCCACATTTATTTGTCTGAACTGCTTAAAA
AGTCACCAACAGGAATTCTTCTCAAACTTGCCATCCAAAATTGAA
CCCCGCTGGCCCAGTGTTTTGACTTGTTTATATTCCAGATAGCCA
CTCACGTAAGTTTATCTTTTTAATGCTGATGGGGGCCAAGAAAGG
AGTTCATTTGCTTCCTGGCTGGGAAATTCAGGAATTGCATTTTGG
GCAGCATATTTTATAGTATGTGTGTAAGTATTTCACTGCTTTTCC
TCAGTTTATTTTTTGTGAGAGTTCATTGAAAATGTCCAAGGCTGG
GCACAGTGGCTCATGCCTATAATCCCAGCTCTTTAGGAAGCCGAG
GTGGGAGGATCACTTGAGGCCAGGAGTTTGAGACCAGCCTGAACA
ACATAGCAAGACCCTGTCTCTACAGAAATAAAGAAGGAGGCAAAG
GCAG

[0973] In some embodiments, the intronic domain that promotes trans-splicing primarily in the heart comprises or consists of sequences from the gene MRPS27. In some embodiments, the sequences from gene MRPS27 comprise or consist of:

(SEQ ID NO: 914)
CTAGGCAAGCTCTGTCTTCACCTGAAAATCCTACTCAACACTGGG
GACAGAGATCTCTTTAGCCATGGGATACCAACTTTTAGAACTAGA
GCTAGAACTTGAGAGTACACTTTGTCACTCTTTCTTATGCTCCTC
CAAGAAATACACATTTCCTCAGAATTGTAAGTGTAATCACATTTT
ATAAGCTGAAATCTCAGAGTACCTTTAGCCTTCATGAGCACAACC
TTGTTGGGGATATTTGGGTTGTATTTGTTTCTCTTTTCTACACTC
ACATGTTTGCCTATCTTGACAGCCTGTTGGCCTAGGCAATAATAA
AGCTTCTGTCGAGGTGAGCAAACAGCTGATGGCATAGGCGCACAG
AGGGGACTCCTACAGTGGCTGGCTGTAATCTGCCAGGCTGGTGGT
CAGAGCAGGCGAGAACAAAAGCCAGTCTGTTTGCAGGCAAATTGG
AAAATCAATGTGTTAGTTGTATTCTTTTCTCTTTGCCTTTCTTCT
GACA

[0974] In some embodiments, the intronic domain that promotes trans-splicing primarily in the heart comprises or consists of sequences from the gene DMGDH. In some embodiments, the sequences from gene DMGDH comprise or consist of:

(SEQ ID NO: 915)
GTAAGCATATCATTTTTTTGAAATTAGTGTTTTTTAAGTGCCAAA
GAAAGAAGATATTTAGCCGTAATGTTTCGTACGATGGACATTGTC
ATGAAGCACTGTGATGCTCCCAAGTTAAACATTTTGTCTGTTTCT
AAGTGACAAAGCCCTCCCTCTATCACTTTGCTCTTGGTGGATGCG
CTATCACTCTGTCCTTGGTTATCCAAAAAAAGTTGCTTATTTTCT
CCATTCTGCATTTTATTTTGCTCCAGATTGTGTTTTTCCAAATTA
TGTTTATTTTTCCTTCCTGTATTCACTGTTTCTCTATATGAATAA
CCAGATTCTAGTGTTGAAGTTCATAAGCATCCTCTTTGTGTCCAA
TTTGCTTTTTAGGGCAGATTTGATCATTTGGGTTCTCTCTCATCC
ATTTCTGATGACTTTTGACTCTAGTTGAAAAAGTTTTTAAATGCT
TTTCCTTCTAGAACATTATTAAACATATTTCATAATCTTCTCTTT
TTGT

[0975] In some embodiments, the intronic domain that promotes trans-splicing primarily in the heart comprises or consists of sequences from the gene DMGDH. In some embodiments, the sequences from gene DMGDH comprise or consist of:

(SEQ ID NO: 916)
AATAGATGAGACCCATATATAATATTTCACTGATCATTCTATCAA
CGTATCCCATCTGAGTTTCATTCTTCTTTGTTTTCCCCACAGTAC
CTTGCCTGAAGGCCTAAAACAAAGTAGATATGCAAGAATTAATTG
TTGAATGATTGAATCAAACATAAATTTCCTGACACCAGATATATT
ATTTAATGTGAATTTATTAACAGTATTAAAAATTAAATATAAATT
ATAATTGATATATCAGTTGGAATTAGATTTGTCTTCAAATGTCAG
AAACCAAAATAAGAAGGTGTAAACAAGATAGAGGTTTATTTCTCT
TTCTTTTCAGCAGTCCAGGACTTGAATGGTGGCTTTTTCATGAAG
TCTTCAGGGACCCAGTCACTTTCCAGATCAAGAAACACTTTTGAA
GTCCAGTTTTACTAAACGTTTACTAGCAGGATATATTTTTACTGA
GTAATAAGTATATATATATTTGAGTATTGACTCTGGTATGATTGA
TTTA

[0976] In some embodiments, the intronic domain that promotes trans-splicing primarily in the heart comprises or consists of sequences from the gene ZCCHC9. In some embodiments, the sequences from gene ZCCHC9 comprise or consist of:

(SEQ ID NO: 917)
GAATGCTCAACGAGCACTGAAGGGGGGACATGAGGCACTGCCTCT
CACCCAAGAGAGCCCCCAAATGTCCTTTTCAGACTTTTATCACAG
TGACCCACTCCCACCGCGCCTTTACCTTGCCTCTGCCTGGAATGT
CCTTAACTCCCTCTTGCCGGCAATTTCACCAGATTTTTGATTTCT
TATCCAGTCTCACGGGAAGCCTTTCCGGCATCTCCCACCCTACCG
ATCTTCCCGTCTATCTCGCCTGCTACACTGTGAGTTCAGACAGCA
CGGATTGAACTCTTCATCTTTTCGTGTCGGCGTCCTGCACAGGGC
CATCCCATCACTAAGCGCGCCACAAACTCAGCCCAGTATTGACGC
CCACGAGTCGCTTGTAAAGACCGTCTGTGACGCCGGAAGTGACGC
GCTCTCGGGCACTATGTGCTTCCGGTCTCCAATACCGCAGGAGGG
CGGTCTTCCCCGGCTCGCCAACTCGGCTGCTCTGGGGGATTCGTG
CGCG

[0977] In some embodiments, the intronic domain that promotes trans-splicing primarily in the heart comprises or consists of sequences from the gene ZCCHC9. In some embodiments, the sequences from gene ZCCHC9 comprise or consist of:

(SEQ ID NO: 918)
TGAGGTTCTCAGCCACCAAAGCTGCAGGGTCTCGTCGTTCGTTCC
CTCTGGCCTGGCGGAACTTGCGTGGGAAGCTGGGAGGACAGAAGG
CTTAGCCGCTGGGTCCCTGAGCTGGCTGGAGCGCGGGCTGTCTAG
GGGCGGCGACCTCAGCTGTTGGGCTCCGGCTGCTGGGGGCTGTGC
GTCCAGCCGCCCTGGAATCCGCCTGTGGGTGGGCCGCTTGGCTCT
CCCACTTCACCCTCTTGATAACCCAGAGCCTCCCCCTTCCCACGT
ACGTAGGGGAAGGATAATCTACTTCCTTTTGAACAGCTTCGGTCC
CCACTATGACAGTCGCATAAACTTCAGCGAAGAGTGCGCTGGTAA
AGTGGCATGGAGTTTCTCACACCAATTCATTGGGTCCACCCTTCA
GCTTCTGTGGAAGGGGTCTTTCTGTTACTAGGAGCTGAGACTTGG
GGGGTTGCCAGGGATGCTGGTCTTAAAAGGTGATAATTTAGGCCG
GGCG

[0978] In some embodiments, the intronic domain that promotes trans-splicing primarily in the heart comprises or consists of sequences from the gene LEAP2. In some embodiments, the sequences from gene LEAP2 comprise or consist of:

(SEQ ID NO: 919)
GACGATCTGGGGAACTGTAGGCCTTGCTGAAGCATCCTCCCACAG
AAAGGAGATAAGGGCCTTATCCAATTGGCTGTACACAATAGATCA
GTGCTTCTTTCCTAGACAAGGCTGAAAGGGGCCAACATTATTTCT
GAAGACTTCATTATTGGAATTCTATGGGAGTGATCTCACTGAGCT
ATTTTGGAATAGAAATGTGGCTAGTTGCCTGACCTCCCTCAATGG
TTTCACGTGGCTTTCAAAGGGAAGGAAGGGCAGTGCTGACTTTTG
GTAAAATGGGCGAAAGGGTCCATGCCAGCAACACAATCACTCAAA
GTCCAGATGAGGGATCAGTAAATACAACGTGCCTGAAAGGTGGCC
CTTGAGCACATTCCTCCGGTAGACATTAACTTATTAAATTGATTC
TGATTACAAATATAAACTTTGCCCCCATCTCACCCAGTAACAATG
CAAGAGTTGATGTCAGTCTATAAAAGGAAGTAGGAACTGTCCCTG
GCTT

[0979] In some embodiments, the intronic domain that promotes trans-splicing primarily in the heart comprises or consists of sequences from the gene LEAP2. In some embodiments, the sequences from gene LEAP2 comprise or consist of:

(SEQ ID NO: 920)
TAAGGAGGGAAGGATACTTATGTGTGTGTGTGGAGTGTGGAGATG
ATAGTGGTGGTGGAACTTGAAAGCTAGATTCAGTCCTGAGGAATG
GTTCCTCTGTTCTGAGTCTACAGCATCTGCGGAATGGAATGATCA
CTCTTCCAAGGTGTGCAGCAGGGTGTCAACACTTTCATATCTGAA
TGTCTTTGCCCTTACAGATAGATGGCTCCCCAATACCAGAAGTGA
GTTCGGCAAAGAGAAGGCCACGGAGAATGACCCCATTTTGGAGAG
GGGTTTCCCTCAGGCCTATTGGAGCCTCCTGCCGGGATGATTCTG
AGTGTATCACAAGGCTATGCAGGTACTCCCTGAACCTGGGAGCAG
GGTTGGGCCAGAGAGCCCTGGGAAGCTGGGCAGAGGAGTGACAAG
GGGACACATGAACCTAAGAATAAAGCTGGGATGGAGGAGTTCTAG
ACTGAGACTGGGAGCTCCATGGAAAATCCCTTAGGAGTTAGGAGC
CAAG

[0980] In some embodiments, the intronic domain that promotes trans-splicing primarily in the heart comprises or consists of sequences from the gene ETF1. In some embodiments, the sequences from gene ETF1 comprise or consist of:

(SEQ ID NO: 921)
GTAAGGGGCCCGCGCTCCCCGGTTTAGATCACTCGGCCCCCCTCG
TGGTAGGCCACCGCTACTTTTGCACCTCTCCCGGGCCCTTAAGTC
CAGGTCCTCCCTCTTCGGGCTCCAGGTGCTGCCACCCGACTCGGG
TGCTATTGTGGCAAAGTGTTCGGCCTTCCTTTCCCAGGGCCCTTC
CCTGATTTCCTCTTCTCCCTTCATTTCTCAGCCAGGCCTCATTAA
AATGGCCTCTCCCTTCTGGGCTTCTGAGACCCGGGTGGGTGAAGT
TTGGATGGGACGGGAAGCAGAGGTGGCCAGGGACAGCTTCTTTCT
GATTCCTGATTTCTCTGGGTCTTCCACCTGTCCCAAGATGACTTC
TCCCAAGTCCTCTAATTACCCCGGAGCTTCCTGGTTTTAGCTGTT
CCAGGACCCACCTATAAACTGAAAATGCCAACGTACGCGCGATGT
GAGGGGTGCTGGGTAGGTTTTGGTTAATGAATCTGCATGTGTATG
TCCA

[0981] In some embodiments, the intronic domain that promotes trans-splicing primarily in the heart comprises or consists of sequences from the gene ETF1. In some embodiments, the sequences from gene ETF1 comprise or consist of:

(SEQ ID NO: 922)
GAGAAGTCGCGGCGGACGCCCAGCTTCTCCTCACTCGCACCGGCC
CCCTCCCTTCCGCCTGCCGCCTTCCACTCCGCCCCTGGCGGAGGA
AGTGATGTCACAGGCCCCATGTGAGCGGATTGCAACACATGCAGC
TGCCTGGAGAGAGGGAGCCGGTGTCCTACGTCAGAGCCGCCGCCG
CCGCGGAGCCGCCGCCGGGGAGGAGCAGCCGCTGCCGCCCAGGAC
TGGGCCCTTAGGTAAGGCACAGGGAGGGAAAGGCCGGTGACCTTT
GTGGCGAGCTGCACCGGACGGGAGGAGAGGGCCTCTGGGGGATGG
CGAGGAAGGGGGCCGCTCTGCCCCAGCGGCGGCGCTAACTCTGTG
GTCTTGGTGTCTCCGGGCCCCGCCGGGCCGCTCTAGGGAGGAGGA
GGCGAGAAGATGGCGGACGACCCCAGTGCTGCCGACAGGAACGTG
GAGATCTGGAAGATCAAGAAGCTCATTAAGAGCTTGGAGGCGGCC
CGCG

[0982] In some embodiments, the intronic domain that promotes trans-splicing primarily in the heart comprises or consists of sequences from the gene RNF14. In some embodiments, the sequences from gene RNF14 comprise or consist of:

(SEQ ID NO: 923)
CATTGCTGTCTTTTATTACATCTTTTTATATTAAAAATAAATAAA
AATGTCATAAATAGTAATTGTGTAAATATAAAAGGCCTTATTAAA
AAAACAAATCTTAGTGCCTCAGTTTTCTCTTCTGTCAAGTGGGCA
CATAAAATTACCTAAGTCATAGGGTCCTGGGCATTTAAATGAGAG
AATGTACGTGAAATATTTAGCACAGTGGAGGGCTAGGCACACGGG
GAGACTGCAGTTTAAAAGACTAACCAGGCACATGAGACCAAAGAC
ACAAAAGTCTGTTATTTTCCTAGAGTCAAAAACAAAACTTATTAG
AAGGCTGTCTTTACCCAATCTTGTCCTCAAAATTGACTCTAAATC
TTTAGTTCACTTTAAACATTCAGTAAATTATTAACACTGCTTTGA
AATTCTCTTTCTATTCTCTCTATCCTGTGACCTCTGACATGATGT
CACAATTCACCTTCTGCTCTGACTTTGTGAGGATTTCCCAAGCTG
GTTG

[0983] In some embodiments, the intronic domain that promotes trans-splicing primarily in the heart comprises or consists of sequences from the gene RNF14. In some embodiments, the sequences from gene RNF14 comprise or consist of:

(SEQ ID NO: 924)
TAGGGTTGCTGTGTGTTTTGCTCTTGGTCTAATTCCTTTGGCTAA
ACATGAATAATTATATTAATGAATGGCTTTGGAGATTCTTCTTCC
GTCCTTTGCATTTTTCCGAGATATGTTTCTGGTTTTGGTATCTAT
TAGAAGGGTATTTTGGTTTCTGTTTTGTGACAATCAAGATTTATA
GTACAGAAAATTAGAAGTGATTATTTCTATTTCAAGGTTCTTTCT
GTGGCAGCCAGGTAATCCCTTGGGTGCCCTGATTTACTCACTTGG
TTTTTTTCTCTCTCCTGGGTATAAGACCAACTACATAATTTACAA
AGCCCAGGGCAAAATAAAAATGCAGCCTCTCATTCAGAAATTATT
AAGAACTTCAAGAGGGTGAGAGCACAGCATCAAATCAAGAGCAGG
GCACTTCTTTTTTATTTTAATTTTTCCATAAGTTATTGGGGTACA
GGTGGTATTTGATTACATGAGTAAGTTCTTTAATGGTGATTTGTG
AGAT

[0984] In some embodiments, the intronic domain that promotes trans-splicing primarily in the heart comprises or consists of sequences from the gene NR3C1. In some embodiments, the sequences from gene NR3C1 comprise or consist of:

(SEQ ID NO: 925)
GTAGGTTATATTTTTATTCCCATTCTATAGCTGGGTAAAGTGAGT
TCTAACAAAGTTACTTGTTAAAGGTCACTCAGAGGTCAGAGCATC
AGAAAAAAAGACAATCACAAGGCTGATGTTGTGTGCTGGATAGTT
TAAACTGAACAGGAAGAAAACATTTTTGTGGGCTTTATCTAAAAA
GAAATAGTTTGCTCTGAGTTTCTCAGTTTCATTTATTCAGCAAGT
ATGTGCCAAGTGCTATTGTAGGCAATGAAGATACAGCAGGGAACA
AAACAAAACTGACATGGAGCTTCCAACTAGAAAGGAGAACGAGAC
AACGCGTTTTAAAATATATATAATGTGTTAGGTAAAAAGTGCTAT
AAGGAGAGCTAAAACACAATGAGAGGCTAGAAGAGTGATAGTGGC
GGAGGGGCTTCTCTGAGGAGATGACATTTGATCAGGGGTCTGAAT
AAAGTAAAGAGGCCAGTTATGTGAATATCTGGAAGACTCAAGGGG
CAGG

[0985] In some embodiments, the intronic domain that promotes trans-splicing primarily in the heart comprises or consists of sequences from the gene NR3C1. In some embodiments, the sequences from gene NR3C1 comprise or consist of:

(SEQ ID NO: 926)
TAACTATAAATTGTGCATTCTTGCATAGATCCTCCTTGGGAATGA
GAAATTAGGAAAATCCAGTTGTTAAAATGAATGCCTAAAATCAAA
ATAAAATTTGTTTTTCTGGCACCTGCTTGATGACACAGACTAATA
ACCAATGACAAAATTGCCCTTGAACCCAAGTTTTCATTTCCTCCT
ATTGTGTGGTCAGGTTATGTAAGGGTTTGCTTTCACCCCATTCAA
AAGGTACCTCTTCCTCTTCTCTTGCTCCCTCTCGCCCTCATTCTT
GTGCCTATGCAGACATTTGAGTAGAGGCGAATCACTTTCACTTCT
GCTGGGGAAATTGCAACACGCTTCTTTAAATGGCAGAGAGAAGGA
GAAAACTTAGATCTTCTGATACCAAATCACTGGACCTTAGAAGGT
CAGAAATCTTTCAAGCCCTGCAGGACCGTAAAATGCGCATGTGTC
CAACGGAAGCACTGGGGCATGAGTGGGGAAGGAATAGAAACAGAA
AGAG

[0986] In some embodiments, the intronic domain that promotes trans-splicing primarily in the heart comprises or consists of sequences from the gene ECI2. In some embodiments, the sequences from gene ECI2 comprise or consist of:

(SEQ ID NO: 927)
GTAGTGCTAAAAAGTGACGACCTCACGCGCGCCCTCCTGCACCGC
TGGGCCCGGAGTGGTCAGGATGGGCGCGTCGGGAGGTCAGGGCTA
TGGTTCCCTGTCAGCAGTCCCCAAGGTCTCCGCCTGCCTCCGCGC
ACGCTCCCATCCTCCTGGGGCCGGACTCCGGGCGGGTGAGCCGCC
CCAGCTGAGCACCCGGGCCTGCACTTCCCAGCCGGGCTGCTTCTG
GGGTGCAAAGCGTCGCTTGCTAAAAGCGAGGTAAACGCAAGCCGT
TATCACTCGTGTGGACTTAACACTCTGCTTCTTGGAGAACACGTA
TGCTATAAAGTGAAATGGCCGGGTACAGAGTAACGGCTAAGAAGC
ACGCTGCACCTCCCTGGGGTCCCGGGAACCCGCACGAATCTGTGC
ATAGGGAACAAAACCGAAACACGGTGGTGGCCTTGAAGTGGTAGA
ATTATGAGTGATTTTCCCGACTTTATGTATTTTCTTAAATGGTCG
TGTT

[0987] In some embodiments, the intronic domain that promotes trans-splicing primarily in the heart comprises or consists of sequences from the gene ECI2. In some embodiments, the sequences from gene ECI2 comprise or consist of:

(SEQ ID NO: 928)
GGCCCCGCCCCCGCATCTGAGCCCCGACTCCTAACCGCCTAGAGC
TCCCGCCCCGCCCACGCACCGACCCCCCCGGCCCCACCCCCGAGC
CCCCGCAGCCCCAGAGGAGGCCACGGGCTAGCGATGGCGAATGCG
GCGTGGCTACGCTCTCAGCCTGGCCCCGCCCCAACCCTGGCCCCG
CCCATGCCCCAGGCTCCTGCCTGGGCTCTGCTCTCGGCCCCGCCC
CGCACCCAAGCCCCGGCCCCACCCCCGAGCCCCCGCAGCCCGGGA
GCCTAGGCCCCGCCCCCGAGTCCCGGCTCCACCCCCGAGACCCGG
CCCCACCCCCGAGCCCCCGCAGACCGAGCTAGGCCCCGCCCCCGA
GACCCGGCCCCACCCCCGAGCCCCCGCAGCCCTAGAGCCGCCCAA
GGGATGGCGATGGCGTACTTGGCTTGGAGACTGGCGCGGCGTTCG
TGTCCGAGGTAAGCTTGGAGTCCCGGCCGTTCGGCCCATGGTCGC
CCGC

[0988] In some embodiments, the intronic domain that promotes trans-splicing primarily in the heart comprises or consists of sequences from the gene ALDH5A1. In some embodiments, the sequences from gene ALDH5A1 comprise or consist of:

(SEQ ID NO: 929)
TGTTCTTTGTGCTTCTTGTATTTGGATGTCTAGGTCTCTAGCAAG
GCTGGAGAAGTTTTCCTCGATTATTCCCCCAAATATGTTTTCCAA
ACTTTTAGAATTCTCTTCTTCCTCAGGAACACGTATTATTCTTAG
GTTTGGTTGTTTAACATAATCCCAGACTTCTTGGAAGCTTTGTTC
ATATTTTCTTATGCTTTTTTCTTTGTCTTTGTTGATTGGGTTAAT
TTGAAAACCTTGTCTTTGAGCTTTGACGTTCTTTCTTCTGCTTGT
TCAATTCTATTGCTGAGGCTTTCCAGAACATTTTGCATTTCTATA
AGTGCACCCATTGTTTCCTGGAGTTTTGATTGTTTTTTATTTATG
CTATCTATTTCATTGAAAACTTCTCCCCTTATTTCTTGTATCTTT
TTTTTTTTTTTTGTGACTTCCTTAAATTGGGCTTCGCCTTTCTTT
GTTGCCTCCCTGATTAGCTTAATAAATAACTATCTGAATTCTTTT
TCAG

[0989] In some embodiments, the intronic domain that promotes trans-splicing primarily in the heart comprises or consists of sequences from the gene ALDH5A1. In some embodiments, the sequences from gene ALDH5A1 comprise or consist of:

(SEQ ID NO: 930)
TGAGCTCATGTGATTTTTGGGGGGTGTTAAAGAATCTTGTTTTTT
CATATTATCAGAGTTGGCTTTCTGGTTTCTTCTTATTGGGGTAGG
CTCTGTCAGAGGGAAGGTCTAGGGCTGAAGGCTGTTGTTCAGATT
CTTTTGTCCCACGGGATGTTCCCTTGATGTAGTAGCTCCCCCTTT
TCCTAGGGATGTGGCTTCCTGAGAGCCGAGCTGTAGTGATTGTTA
TCTGTCTTCTGGATCTAGCCACCCAGCAAGTCTACCAGGCTCCAG
GCTGCTACTGAGGGTTGTCCGCACAGAGTCCTGTGATGTGAACCA
TCTGTGGGTCTCTCAGCCGTAGATACCAGCACAGTATTTGGGGTG
TCTCCCAGGTCCTGCAGGAGCAATCTGCTTCCTTCACAGGATCTG
TATGCTCTCCCAGTTTTCCTGATTTATTCCTGCAGTCGTTCTGGA
GCAAAAGTTCACAATGCAAGCCTCCACATGCTGTTTTGTCCATCC
GAGT

[0990] In some embodiments, the intronic domain that promotes trans-splicing primarily in the heart comprises or consists of sequences from the gene APOM. In some embodiments, the sequences from gene APOM comprise or consist of:

(SEQ ID NO: 931)
CAATCCACCGTGCCCCAGCACCTGCATCATACCTGTTCTAAAGCA
TTTACCAAGTTGTATTGCAATGGTTTGTCTACACAGCTAGTTTTC
CCTCTAACGACTTCTTCAAGATCAGGGGCTATGTCTTATTCGTTT
TTTTATGTCCCCGGGGATTAGCTAGTTCTTGGGAAACAACTGGGA
CTTGGGATTCAAAACAGTTTGCTAAGTGAATGAATGAGAGGCCCA
GTCAAGCTACTTCCCTTCAGTGCTGCACAGTGCAACAAATAACCA
GCTCAGATACAGGTTCAAAGACCACAGGCTTCTCCCTGGACAGCT
CAGCTCTCCTCATAACTCCTGAGAAACCCTGGACATGCCAGGGTG
TACTATGGAGTGGTTGCATCCGGAAGAGGGGGAGGAAGTCCCAAA
CACTAAGTAATCCAGGTTTGGGTTGGAAAACAAGGTTGAAGTTAC
TCATTAGCAGGTGAAAGGGTCAAGGGTCGAACGCAAGGGAGCTGA
AAGC

[0991] In some embodiments, the intronic domain that promotes trans-splicing primarily in the heart comprises or consists of sequences from the gene APOM. In some embodiments, the sequences from gene APOM comprise or consist of:

(SEQ ID NO: 932)
TATGGACTGAGATTGGGGGAAGCCTATGGTGGAGGCTCTGAGGGA
CTTGGGTGGATGGCCTAGGATGACTGGAGACCATCTTGGGAAAGG
AAGAGAGGAAGGGGGTGTGAGTGTTGTGATAATGAAAGCAAGAAG
AAAAATATCAGTACTGTGGCCATCAATGCAGAGGCATGGCAGAAT
TGGGGGGTGGGGTGGTTACCCAGGTTGACTGGGGAGGGGCAAAGA
GGAAAAGTCATTTAATGACTCTTTGTCATGGATCCAATCCCCAGT
TGGAAAGAGGAAGGCAGCCAACACCTCTACCCCTAAATCTTGCTG
TTTTGACTGATGAAGAGGTTGAACCCATCCTGTGCTGGAACCCAC
CCTCTTTTGCTCCCTTCATTGTCTCTCCAGTTCCCAGAGGTCCAC
TTGGGCCAGTGGTACTTTATCGCAGGGGCAGCTCCCACCAAGGAG
GAGTTGGCAACTTTTGACCCTGTGGACAACATTGTCTTCAATATG
GCTG

[0992] In some embodiments, the intronic domain that promotes trans-splicing primarily in the heart comprises or consists of sequences from the gene FKBP5. In some embodiments, the sequences from gene FKBP5 comprise or consist of:

(SEQ ID NO: 933)
GTAGGGACCCCATGGAGTACGTGACGCCTGGCCCTCCAGCTGCAT
GCTCCAGTTATCAGGACAGAGACCCCTCCCCACCCATTCCCAGGC
TTCCCTGGCTCCCTGCTCTGCTGCTGGGAGGCCCTGTCACCACAC
ATGCGCGTGCACGCACTAACATACACACACCCCTCTCAGGCACCC
CCGGAAGACCAGCTGCAGCTGGGGGTGGGGGTGCACGGAGCACAG
CCAGGGTTCTCAGATCCCTAGCCTGCTCTCCCACCCCGCCCTAGC
CCCCAACTGCCGAGCTGCTTCTAGTTTTAAAGCAAAACATGACTC
TGTCCTTCCTGCTGCTCAGTGGCAGCAACACTGCCTGGGGTTATT
TTTAGCAGGGATGCAGGGAAGGCACAGTTCTCCTTGACTTTAACT
AGGGACAACCCCCACCCCTCAGCCAAGACTCACTGGAGGAGGCCG
GGTACGGAAACCCCCCTCCCAGAAAGGGGAAATGGTGTGTTTTCT
GTTC

[0993] In some embodiments, the intronic domain that promotes trans-splicing primarily in the heart comprises or consists of sequences from the gene FKBP5. In some embodiments, the sequences from gene FKBP5 comprise or consist of:

(SEQ ID NO: 934)
GGACAGTCATCTTGGACATGCTCTGTGTTCCATATCATGACTTCA
AGCCTTGCCTTTTTCATGTACTACCAGTGGGATCCTAGACTAGCA
CTTTACCACTTTAAGCCTCAGTTTCCTAATTTGTAAATAAGGAGT
AATTGTAATCATTCCAATATCACAGGCTTGCTGGGAGGATTAAAT
GAGATCATCCACATCAGGGTCAGCACAGTGCCCGGAATGGGGTAC
CTGTGAAATTAATGGTGATTCTTCTTTATTGTTACCTTGGAAAAT
GGAGGCCAACTGCAGGATGATCGTGGCTCCAAGGAGCTGGGGACC
CAAGACATGCACAGAGAAAGAGAGACCAACAATGTGAGGCCTCTG
ATGCATGAGACAGGCAGGGGAGTAGTGGGAGGAGAGAGCAAGAGT
GAGCAGCCAGGAGGGCCTCTTCCCTTCCCTTTACTCAGCCTGTCA
CTCCTCTGCTAGGATCCTGCATTGACACATCTTGTACTTCCTGTT
TCCA

[0994] In some embodiments, the intronic domain that promotes trans-splicing primarily in the heart comprises or consists of sequences from the gene SLC22A7. In some embodiments, the sequences from gene SLC22A7 comprise or consist of:

(SEQ ID NO: 935)
AGGTGTGTCTTAGGCCAGGGCATCAGCTCCCAGCAGGGGAGAGGG
ATGCGAGGAGGCCTCATGGCTCAGCAGAAAGAAACCTGGTTAGGA
TCCAGCTTTCAGTCCTGAATCCTGGGCTGTCGGCCAGGCCATGGC
TGTAGCTGCAAATAGGCAAGGCTGACCTAAGGTCTCACAGGACAA
AGGGCACCCTGGGAGAGCTGGCCCCAGGCCCCAGGGGCCTCCTCT
TCTTAGGGATCCTGGGAGCTCTGCTGACCAAGGGGCTAGGGGCTC
ACCTCCTATGCCATCACCCAGCTACCTCATCATGGTAGCCTTGGT
CCCTGAACACTAATGGGTAAGCCCCAGAGCCACGAGCCAGTGACC
TCTGAATGGATGGCTTCCCCTTCCCCCAGGCACCAGGCAAGACAG
GTAGAGGTCCCTGGAGACCTGATGGCTGGGGAGGGCCCAGTCCTG
GGCCAGCCCCTGAGGGCTGGATTCTGGCTGCAGGCTCTCCAGTCC
ATCC

[0995] In some embodiments, the intronic domain that promotes trans-splicing primarily in the heart comprises or consists of sequences from the gene SLC22A7. In some embodiments, the sequences from gene SLC22A7 comprise or consist of:

(SEQ ID NO: 936)
TACTTAAGCCCAGAAGTTGAGAGACATGTGAGAGGGATGGGCCTG
CCATTGCCTTGGGTGGTTACTGTGTAGGCATTAGATGTATTACTT
TACCTCTTAAAGTCTCAGTTTACCAATCTGTAGATGGGGGCTATG
AATATAAGGCACTTTTAGTTCATGGCTTGTAGTAACAGGATCCTA
CACAAGAACTGTTATCATCATCATTAATTGGGAGGTGATTAAGGC
AGGGAAGGGCTAAAGTGGCTTCAGGGAGTTGAGACAAAGAGCTGA
GAAGGCAATTTCTGCAGCAAGAGGTGGAGAAACAATAGAGGCCTT
CTTTTCTCCCTTCCTCTTTTCCAGTCCCAGGTCGGTATTTACATA
ATCCATCTGGAGGTGGAATGTCGGTGGAGGCAGTCTCCCTGGGAG
GCAGCAGGTCGAGGCCTTCCTTGGGAAGAAGCTGAGGCTGCAGGA
CTGGGGAGGGACAAAGTTTCCTATTCCCCAAGCTGGCGTGAATCG
TTGG

[0996] In some embodiments, the intronic domain that promotes trans-splicing primarily in the heart comprises or consists of sequences from the gene MLIP. In some embodiments, the sequences from gene MLIP comprise or consist of:

(SEQ ID NO: 937)
TCACTACAGATGCTCCTGTATTGTTGCTTACAATTTATATACTAA
GGATAAAGTTACTGATATTTTGAAATAACTGTGTGTTTTCTAGTT
CTTTATTTGGACACAGTGTTTGCATGTATTTATACCTCTAAATGT
TCTCTATGAGCATGACCAACTGATTATTGAGATTGGCAGGTGCTA
GCGCCCTTCAATCAGCTTCTCATTGCTGCACAATCTGGCTTTTCT
CTTCTTTTCACAGAATATATAATTGGAATACATGCATGAAAAGAA
AAGAGGGAAAACACATATCAGTGGCTTTTTTTCTTTTTCTTTTTC
TTTTTTTCACTTCTACTGATTCCATTTCAGCAGTTAGTATGACCT
CTCATAATGTTCCAAATCTAAAAATTGTCAAAACAGAAATCTACT
CTTCGGAGCTGACACAATTCCTCAATTTTGGAATGACTCTGCTTT
ACCTCTTTTTAGAATTTCTTCTTTCTGCGTGAGTGTGTGTGTGTT
GTTT

[0997] In some embodiments, the intronic domain that promotes trans-splicing primarily in the heart comprises or consists of sequences from the gene MLIP. In some embodiments, the sequences from gene MLIP comprise or consist of:

(SEQ ID NO: 938)
TAAAAGGAAGTCTTTGCTTAATGCTTTCAGTAACTTTTAAAAGCA
GTGTACGGTGCTGGTGGTATTTGCTGCAAGGATGTGAGGGAGAGC
TGCCCAGTGAAGATAAATTTGTATGTATATTGAAATGAAATGCTA
TCTTCACTTAGAGAAAAGGGTGAGCTGATAAAGACAAAACTGCTC
ATTGGGCAAAGAAAATGCTCAGGATTGCCCTTGGCACAGTGATAA
TGTAAGATACCCTGTAATGCCTTAACAGGAGGCTAGAGGCCATCT
GCGAGTGTGGGTGTCAACATCTGAAGGAAGAGAACTTTTAGGGAA
ATATAAGAAAGGAAGGCATTACAGCCCAAAACTGAGCAAAGGAGC
TGTTAGCCTGCGTGGCATGCGGGAAAACAGTTTCTCAAATTATTA
GGCTATCCGGTGAGAAGATGACGTTCTTAGAGATTTTGAGCATTT
CAAAGTGTATTTAGAAAAAGATTTTAATCCTTTTATCTCATATTT
CTAT

[0998] In some embodiments, the intronic domain that promotes trans-splicing primarily in the heart comprises or consists of sequences from the gene ENPP1. In some embodiments, the sequences from gene ENPP1 comprise or consist of:

(SEQ ID NO: 939)
TAGGAGCAGCGTGCCTATGGAAAATAGAAAATAGGTTCTTTTTGT
TTTTGTTCTTGTTTTTTGCTTCAGAAATAATTATAGAAATCTGTG
TTTAGAAGCAGTCCTAAGAAGTTACATGCAAAGAAGTACCAGTCT
TGGAATGAGAGTGAATCATACACATACACTCCCAGTTAATATCCT
AGGTGGTTTGGGGCAAATAACTGGGCTTTCACATTCGGTCTAAAA
ATGTGATAAGACATTCTTCTTTGCTCACATAATGATATTGTAATA
TATAAATAAGAAGAAACATTAACCAAAATTTGGGTGACGGAAAAG
ATTTTGAAAAAAGTGAAGTGATAGGTACAGCTGAAATTCTGTCTT
ACCTATCAGATCTTCAACTAATATGAGTGCTACACCCATGTTTAA
CGAATTTAACCTTGGAAGTGAAAGAAGTTCTGCTCTGCATATTAA
ATTTTTTGTTAAAGTTACAGCATGTTTTGGGATTTTTTTTTTCTC
CTAG

[0999] In some embodiments, the intronic domain that promotes trans-splicing primarily in the heart comprises or consists of sequences from the gene ENPP1. In some embodiments, the sequences from gene ENPP1 comprise or consist of:

(SEQ ID NO: 940)
TAAGTATATCTCTGTGATAACTTTGAATATGGTCATATTAAGAAT
ACCTTCCTTTAGGCCGGGCACAGTGGCTCATGCCTGTAATCGCAG
CACTTTGGGAGGCCAAAGTGGGTGGATCACCTGAGGTCAGGAGTT
CGAGACCAGCCTGGCCAACATGGTGAAACCCTAAAAATACATATA
CGATACTATACTATATCTATACTAAAAATACAAAAATTAGCCTGG
CTTGGTGGCAGCTGCCTGTAATCCCAGCTGCTCTGGAGGCTGAGG
TACAAGAATCGCTTGAACCCAGGAGGCGGAGGTTACAGTGAGCTA
AGATCATGCCACTGTACTCCAGCCTGGGCAACTGAGTGAGACTTG
GTCTAAAAAAAAAAAAAAAAAAAAAAGAATACCTTCCTTTAAATC
ATTATATCGCTAAACTAAAGGGAATCACAGTTAATTTTTTTATGA
TTAAATCTCCAATGCAGAGCTTTTGTACACAAATGGATTTTATGG
GACT

[1000] In some embodiments, the intronic domain that promotes trans-splicing primarily in the heart comprises or consists of sequences from the gene VNN1. In some embodiments, the sequences from gene VNN1 comprise or consist of:

(SEQ ID NO: 941)
GTAAAGAAACAACTTGTGAAAAATTCACTAGTAAACATCAACTTG
ATTTACCTGGGAAAACTTTGTTGATGATCATTGCATAGATCCATG
ATCAATTCTTAAGTTTCAGTATAGCTTATTTTTCATCTACTATGG
GTATATTTACTGGGAGAGCAAATATGAATTATGAAGTCACAGAAG
TCAGAGCTAGAAAGTAGCTTAGAAATCATCACATTCAGTGTGAAC
ATCTCTGGTCTCTGACTCCTCACCAGTGAACAGAAAAATATTTCC
CTGTGTAGGTCTGTGATTTGAAAACTATATGAGTAAATGGCAAAA
GAGAGTCACATCAGTTTAAGATTAATAGTTTTCCTTTCTCATTGC
TAAGATAGCTGATGAGGTTAATGTAGTAAAGTCCTTAAAGTGTAA
GCTGATTGTAATCTAAGAGGTGATATGGCAGGATTTTAAGTGGTT
TAAGTCAGGTCTCGGCTACAGAGATATTAAGTGTGGTGAAAGCAG
CACT

[1001] In some embodiments, the intronic domain that promotes trans-splicing primarily in the heart comprises or consists of sequences from the gene VNN1. In some embodiments, the sequences from gene VNN1 comprise or consist of:

(SEQ ID NO: 942)
CATCTCTACTAAAAATACAAAAATTAGCCAGGCGTGGTGGCAGAT
GCCTGTGATCCTAGCTACTTATGAGGCTGAGGCGGGAGAATCGCT
TGAACCCGGGAGGTGGAGATTGTGGTAAGCCGAGATCTAGCCATT
GCACTCCAGCCTGGGCAGCAGAGCGAAACTCCATCTGAAAAAAAA
AAAAAAGAGAGAAAAAAAAATGCTTGACTAGAAGCCCAAACCTCA
CCATTATGTAACATATCCATGCAACAAACCTGCATTTGTACCCTT
TGAATCTAAAATTAGAAATAAAGAAAAGAAAAGAAAAAGAAAAAG
AAGTGACAGTGCACTGAAAAAAAAGGAAATTAAAATGCTTTGGAA
AAGAAAATAAATTATAAAAATATAGAAAACAAAATAAGATTTAAG
GGGTGTGGGGGAAGCCCAAATAGTTGTTACTCAGCCACTCAGCTC
CTCAGCTCCTCTTGCAGGCCCCCCTTTGGATTAAGTTGCATTTTT
AACA

[1002] In some embodiments, the intronic domain that promotes trans-splicing primarily in the heart comprises or consists of sequences from the gene SGK1. In some embodiments, the sequences from gene SGK1 comprise or consist of:

(SEQ ID NO: 943)
GTTCGTACTTACCGTACTATATTTTGCAGATGCCTCAAAGGATTT
GGGGTTACTTGGCATGGGGAAGGCACATAAGGTGGGGTGTAGGAG
AGGGTCTCTGGTTGTAGGTTTCTTAATTTAATGTTTGAAAACAAA
CATGCAAAAGTCTGTGTGCAGGTTGATGTTTCTGGGCAGCCTGAG
CAAAATTTGCTCTCTCAAGAGGGAAAGGAACCAGGTGGGAGCAGA
GCTAGGCTGGGCTAGGCTAGTTGAATGGTGGGACATGACATACGG
GTGGCACTGGCAATAACAAAGTCACATTCTATGAAGATTCCCTGC
AAGAGGAAGCAGACATGGGCCAGTTACTGTGATTTGAAATTGCCT
AAACATTGCTTTAGGTTGGCATGTCAATTTCAGGTACTAGTGTTT
TTTTTGTTTTTGTTTTTGTTTTGTTTTTGTTTGTTTGTTTGTTTT
GAGACGGAGTCTCGCTCTGTTGCCAGGCTGGAGTGCAGTGGCGTG
ATCT

[1003] In some embodiments, the intronic domain that promotes trans-splicing primarily in the heart comprises or consists of sequences from the gene SGK1. In some embodiments, the sequences from gene SGK1 comprise or consist of:

(SEQ ID NO: 944)
AGTAGGTTGCTGGGACAGAACAGGGGGCGCCTGCTCCACCCATCA
CGTATCCGGTTGGAAGAAAAGCCAGTCTCAACAACTTGATTCTCT
CGGTTAAATGATAAGTTTAGCCGACCATCCGTCTCCAAGTGCTGA
ACATTAGGGTAGGGGAGGAAGGAGCACATCAGACGTTCCCTTTCT
TTTCCAACCACAAATCATACGGTTGCATCTATTCTCTATTCCGCG
TAGAACCCTCCGACCTGAATGCCACGTTCCTCCCGGAATGCATGC
CACAGAGCCTCTGAGAAAATAAATCCTGTGCATGTGTTTTGAATT
TTTTCCGGACTGATTTGTGAGGATAATCAGTTAAGTTACATTTCT
TGTGTGCGTGCTGGGGGTGTAATAAAGCTAGGACACTGATGACTG
TAATTTTCTGAGTGATGTCGCAATGGGGAGAATAAATGGCCCAGT
GTTGAACTTTGCAGCTTGCTCCCTTCCTGTACTTAAATTGCCTTG
ATAT

[1004] In some embodiments, the intronic domain that promotes trans-splicing primarily in the heart comprises or consists of sequences from the gene PLG. In some embodiments, the sequences from gene PLG comprise or consist of:

(SEQ ID NO: 945)
ATATCCCCAGAGTGGGTGTTGACTGCTGCCCACTGCTTGGAGAAG
TATGTTTAGGGGACAATTGACATGAAGTCTTGTCTTAAATACTTT
TTCTGTCCTTCTTTTCCTCCTTTCCTCCTTTCCTTTCTCACTCTT
CCTCCCTTCCTTCTCTGGCTGTGACACTAGGGACCAGGCCAGGGC
AATTGGATAAGAGAGAAGGGAAGGGTTTCTAGAAAGAAACTGCAG
AGGAAAGACACAGTACAGATGATTTTGTGGGCCTGAATAAACTGC
AGAACAGAGCTGTTCACTACCATAGGCTGTATCAGTCTCTGCCCA
AACAGCCCAAGAACATTCCTTAACTGCCTGTTTCAAGCAAATCAT
GAATTTTGCTTCTTGCCACTCAGAAGTCACTAATTCTGAGTGGCC
AAGGGTGTCAGGGAGACAGCACCAATTTCATGGCACAGAGGTTAC
CTGAAGGGGCTGGACCATATTTTCCTCTTGACGTCCTCATCTTTT
CTAG

[1005] In some embodiments, the intronic domain that promotes trans-splicing primarily in the heart comprises or consists of sequences from the gene PLG. In some embodiments, the sequences from gene PLG comprise or consist of:

(SEQ ID NO: 946)
TACTCGTTCACCTGTGGTCTTCACCCCACGCTGGTGAAGATATTT
GCTTTATGTCTGGGTTTTATGGGCCATGGCCACTGCATGGCAGTG
GGGAGGAACTGTCTATCACATGAAAGGCTCAAGGGCTTTGGGGAC
AGCATCAATCTTCAACCCTAGCCCTGCCACATGCTAGCTGTGCTC
TTGAGAAAGGCAGCAGGACTCCGTTTTCTCATGTGGAAAAAGAGT
TGAAATGAGGTACTCTGTTACTCCTAGAACTCACTTAATGTTCAC
CAGTTCATACACATTCATGATCAGAGAACGATTCAGTTATTCCAG
GCTGACAATTCCCCCTTCATCATAATATGTTTAAGAGAATCATAT
AAGACTATATTTGTTTCAAAGCACTTTAAAAACCACAAGATCGAG
TTGGGTGTCTGGTGTGGGTGCCTGTAATCCCAGCTACTTGGGAGG
CTGAGGCAGGAGGGTCACTTGAGTCCCGGAGTTTGAGGCTGCAGT
GAGT

[1006] In some embodiments, the intronic domain that promotes trans-splicing primarily in the heart comprises or consists of sequences from the gene ABCB4. In some embodiments, the sequences from gene ABCB4 comprise or consist of:

(SEQ ID NO: 947)
GGTCTCGAATCCTGACCTTGTGATCCGCCTGCCTCGGCCTCCCAA
AGTGCTGGGATTACAGGCGTGAGCCACCTTGCCCGGCTGATAGTG
GTTATTTTGAAGTAATGGAATATTTTATTCTAAATTTTCTAAAAT
GATTATATATTTTATAAAGTAAAGCATTCAAAAGAAAAAAGCTGC
ACAAATTACATTTTTAGCACATTAGGAATGAAAAACTGGAAAATA
CTCAAAAGGGAACTAGTTAAACAGAAGATTAGAAAATTTAAATAC
TTATGAATTTTTTTACAGCATGGGAACCCATTTGTGTTATATTTA
AAAAGCAGAACATAACTATGTAGATTAAATGTTGATTATACAAAA
TACACATGCATAAAGTTCAAAGATTCTAAGATACTAGAAATTAAA
AGTTGATTAGAAAGGTAACATTTTCAAATTTACTTGAATGTTAAA
ACTAATTTATACAATTTTTGGGATAAGGTGTCTGTCTGATTTATC
AATA

[1007] In some embodiments, the intronic domain that promotes trans-splicing primarily in the heart comprises or consists of sequences from the gene GSAP. In some embodiments, the sequences from gene GSAP comprise or consist of:

(SEQ ID NO: 948)
GTACGCAAGTATTTCTCACTTTTATCATGGTGTACAAAGAGTGGA
AACAACTCTGTTGTAGCAAAACCCTTTTGAAATGCACTAGTTCAA
ATCAGTTCTCACCAGCTTCAACACCATCTAGCTTAATTCTATACT
CAGCATTTAAAGTTATGCCCCCCTGCATATGTACCCTTTAATGTA
TAATAAAAGCTAAAATTAAAACAAAGTTATGCCCGTTACTTTACC
CATCCTCTTTCCCTGGCACATGGTTGGTGACAGGGGAGGGACAAA
TGAGCCCAGTACTGCCAAGAAGGGGAATTTCACTTAATACAATGT
GTAACATATGTTCCTACTCTGATTAAATTCTAGGCATTAGGCCGA
TGGTCACATTCATATTTATGGGGCTTTCTACAAGGCATAGCATTT
CATGATTAGCATGAACCCTTGTGTAGTACTCAAAGCCACTGCTTA
GGACAAATGGAGCATCACAGATGAGCTCCTTGGCTGACATGCTGC
TTTG

[1008] In some embodiments, the intronic domain that promotes trans-splicing primarily in the heart comprises or consists of sequences from the gene GSAP. In some embodiments, the sequences from gene GSAP comprise or consist of:

(SEQ ID NO: 949)
TGAGGACACTGCAATTTGGAGAGGGTGGGTAACTTGTGTAGGGTA
ACACAACTAGTAATGTATAGAATCTGGACTTGATACCAGTCTTAC
TTCACAGCTCATGATCATGACCTCCATTCTGTGTCTCTTTTCTTC
TGACTGTCCACTGTTGGCTCTTGCGTTGTGACAGGCCTGGAGCAA
ACCCTGTAGCACTTTACCTTCACTGATGGATGGGGGTCTGTAAGT
GTGAGTGGTGGGGCCAGTTAGCTGGGCTGGGGAGGCTGAGCTGGG
GCACTGCCCACACAAACAGAGGATGCTTTGTTAGTTTCTGGTGCA
CATTTTCAGTCTTTCTATTTTGGGTTCAGTGCTTCAGAATTGACC
TCAGAAAGGCTAGTTGTGTGTCTGGATGCAGCCTGAATGCCAGCT
GCCCTGAAATGCTTATCTGAGTTGTGGAGGCCTAGCTGTGGGGCC
CTTGAGGGAAGGAATGGAGCAATGGTTAATGGACTGTCTTCACCC
TCCA

[1009] In some embodiments, the intronic domain that promotes trans-splicing primarily in the heart comprises or consists of sequences from the gene ABCB4. In some embodiments, the sequences from gene ABCB4 comprise or consist of:

(SEQ ID NO: 950)
ATCTGACTTGTAAAATAAGTTTCTGGTTTGTCATCATAAAACATA
GGTATGTCTGTCTCATTCTAGATCAATTTAGAAGACCCAATTTGG
GGTTTATTACGGCATTTGAAATTTGAGAGTTAGAAGTGACACCTG
TCTTGATGAAGTATTGAAACAACAGGCTAGCTCTCCCTAAGTTAT
TAGAAACATCCAGAAAAAGAACAAAATTCAAGGTAAGTACAGGTG
TAGAAATATAGAAGCCACAGACATAGGGAAATGGTCTTATGGTCC
TGAATGGGTTGGGTAGACAGGAAAGTTTGGGAATAATTTTCCCAA
GTACAAAAGAAAAATAAATTGTTCAATAGCCTCATCTCTCTTGGT
AATTTTCTAAATCATTCTATTGTGGAATCAAAGTTTTTTAAATGA
ATGAATTTCCAGCTTTATCATCCAACATCAAGAGAAAATGAAATT
GCCCTACCGAGCTAACTCTGAAAGCACATATCGGTTCCATAAAGC
AAGA

[1010] In some embodiments, the intronic domain that promotes trans-splicing primarily in the heart comprises or consists of sequences from the gene STEAP1. In some embodiments, the sequences from gene STEAP1 comprise or consist of:

(SEQ ID NO: 951)
AAACTCTGTGTTGAAAAAGTCATCTATTTTAAAATTTTTATTATA
ATTACACTAGGGCTTGGTTGTCAGTCGGTTTTATATTGAGAAATG
TTTTTTAGGCTGAAAATAAGGTACAACTTTAGCAACATAAGAAAC
ATTTTGTTCATGGACGAGGCCATATTTCAAACTTCTACCACCCTC
ACAAGATTACTTTTTAATATTGTTGTTCTTCTCCTTGTTTACCAA
TATGCATGCACATTACAGTTCTATCCAAGTAAACCATCAAATAAT
TATTAGAAAATTAATAGATTATGGAAGTGTTGCATTCAAGAAAAA
AAGTGATAGCTCCTATGTCATTTGTCTTAGAGGAATGCAAAAAAA
AAAAAAGAAAAAGTCATAAATTTGTGGAGACCTGTTATCAGGGCT
TCATAGTAGGCACAGGGAAGAGTGTAGAAGGAGATTCACATTCAG
GAAATAACTGTTGTTTGCATTTCTTCTTTCTTTATTTACCTTCTG
GTAG

[1011] In some embodiments, the intronic domain that promotes trans-splicing primarily in the heart comprises or consists of sequences from the gene STEAP1. In some embodiments, the sequences from gene STEAP1 comprise or consist of:

(SEQ ID NO: 952)
TAAATAATATATAAAATAACCCTAAGAGGTAAATCTTCTTTTTGTGTTT
ATGATATAGAATATGTTGACTTTACCCCATAAAAAATAACAAATGTTTT
TCAACAGCAAAGATCTTATACTTGTTCCAATTAATAATGTGCTCTCCTG
TTGTTTTCCCTATTGCTTCTAATTAGGACAAGTGTTTCCTAGACATAAA
TAAAAGGCATTAAAATATTCTTTGTTTTTTTTTTTTGTTTGTTTGTTTT
TTGTTTGTTTGTTTGTTTTTTTGAGATGAAGTCTCGCTCTGTTGCCCAT
GCTGGAGTACAGTGGCACGATCTCGGCTCACTGCAACCTGCGCCTCCTG
GGTTCAGGCGATTCTCTTGCCTCAGCCTCCTGAGTAGCTGGGATTACAG
GCACCCATCACCATGTCCAGCTAATTTTTGTATTTTTAGTAGAGACAGG
GTTTTCCCATGTTGGCCAGGCTGGTCTCGATCTCCTGACCTCAAATGAT
CCGCCCACC

[1012] In some embodiments, the intronic domain that promotes trans-splicing primarily in the heart comprises or consists of sequences from the gene PON1. In some embodiments, the sequences from gene PON1 comprise or consist of:

(SEQ ID NO: 953)
GTAACAATATTTACTATTTATTAAAACCAAAACCAAACTTAAAACAAAA
ACAGAAAAACATGCCAATAAATGAATTATTTTTTCTCATTCAAACAAAG
CATAGTCATGAATAATGTTCTTACTCTGGGTTTTAAACTTACCCTCTAT
GTTAATTGAACTTTATAGTAAAACCACTTAAATACTTGAGAATGCTAAA
ATATTTAAGATTTGTAAAGCATCTAATTTTGTAAAATACTAACATTCAC
ATTATCCCTATAATTACCATAATAATAATATCCAGCCCTGATCATTATA
GCTTTTCCATTTTAAACGATTTTCAAGACTCGGGCATTTACAGGAACAG
ATTTTTCTAACCCAAGGCATCTGTAAGCTATAGGTCCAGTGACAGAAAG
TCACCATGGTCAGCTTTCTGCCGGTCCCATTATCTTCAATGCCTCCTGT
CCGCTGGTTCCTCTGTTCTGTGTTCAAAATGCTCCTCTGCATGTTGGTC
CCTTTCAAC

[1013] In some embodiments, the intronic domain that promotes trans-splicing primarily in the heart comprises or consists of sequences from the gene PON1. In some embodiments, the sequences from gene PON1 comprise or consist of:

(SEQ ID NO: 954)
TCTTATATGGGAACACAATATATAAAACAACAGCTTTATTGTTTTGATT
GAAGGCTAAGAAAGGAGTAGTTCCTCTGGCCCACCAAAACTCTGTCTTT
GAGATGCTTCCAAGGACCTACCAGGGAACAGTTTAAAAGCCATAAGCAA
TATTCTCTCTGTATTCCTTGCTTATATCATTGAAGACTATTATTAATTG
CCTTTTTGGTCTGCTCTTCCATTTTTGATCTTTCTCATGGGCTGGAAGC
TGTAGTGTCGTGCACATATGACTTTGCTGCAGGGGATGAAAGGGTTTGT
GTGGGGTGGCCTAGTGGAGCATGTGGCTTCCAGAAGACTTCTCCTGGGG
ACCCATTACAGAAGCTAACTAAGAGGCTTCCTATGTGGCCATCTGGCTA
GCCCTGTGGTTTGGAGCAGTCAACATGAACCCATGGGCCATGCAGCGCC
TCTATTAGCATTTGAAGTACTGGTATTGTGCTTGATTTTTCTCCTCCAT
GGTTTATAA

[1014] In some embodiments, the intronic domain that promotes trans-splicing primarily in the heart comprises or consists of sequences from the gene TFR2. In some embodiments, the sequences from gene TFR2 comprise or consist of:

(SEQ ID NO: 955)
GTGAGTGCGCGCGCGGGCGGGGGGCGCGCGGGGAGGGGGACGCGGCTCG
GGGCGCTCACCAGCCCCGCTCCCCAGGGCTCACCCCAACACCCTGCACT
GGGTCGATGAGGCCGGGAAGGTCGGAGAGCAGCTGCCGCTGGAGGACCC
TGACGTCTACTGCCCCTACAGCGCCATCGGCAACGTCACGGTGAGCACC
CCCTGCCCGCTCCTAGGATGGGGCGCGGCACGAGCCCTTTCCTGGGTCT
CGAAGGAGGGACGCGGGGAGCGCGCCTCACCGTCCTCGTGTCCCCAGGG
AGAGCTGGTGTACGCCCACTACGGGCGGCCCGAAGACCTGCAGGACCTG
CGGGCCAGGGGCGTGGATCCAGTGGGCCGCCTGCTGCTGGTGCGCGTGG
GGGTGATCAGCTTCGCCCAGAAGGTAAGTGTCCCTGGACAGAGGGAGGG
CTTGAGCCCGGGAACCGGAGGGTCGGACTGCCAGTGAGAATCGTTCAGG
GTGCTGTGA

[1015] In some embodiments, the intronic domain that promotes trans-splicing primarily in the heart comprises or consists of sequences from the gene TFR2. In some embodiments, the sequences from gene TFR2 comprise or consist of:

(SEQ ID NO: 956)
AGTCTCCGGCGCCGCCCTGGTGGTGATGGGAGAAAATGGGTCCGCGGAG
GGCCCTGCACTGCGGCTCGCGCCTGTAATGCCAGCACTTTGGGAGGCCG
AGGCGGGCAGATCACCTGAGATCAGGAGTTTGAGACCAACCTGGTCAAC
ATGGTGAAACCCGTCTCTACTAAAAATACAAAAATTAGCCGGGCGTGAT
GGCACGTGCCTGTAATCCCTGATACGAGGGAGGCCGAGGCAGGAAAATG
GCTTGAACCAGGAAGGCGGAAGTTGCAGAGAGCCGAGATTGGTCCACTG
CACTCCAGCCTGGGCGACAGAGCGACACTCCGTCTCAAAAAAAAAAAAA
AAAAAAAAAAAAAAAGCGTCCGCGGGGAGCGCTCTTTTCCTAAACTCAG
GAACCCCTCGCCGCCCCTGCCCCTGGCGACCCCACGTCTCTGGCATCCT
TCCCTCTTCCCTCCCTCTCCTCCGGGCGCCCAGAAAAGTCCCCACCTCT
CCCCGCTTA

[1016] In some embodiments, the intronic domain that promotes trans-splicing primarily in the heart comprises or consists of sequences from the gene SLC39A14. In some embodiments, the sequences from gene SLC39A14 comprise or consist of:

(SEQ ID NO: 957)
ATCTCGGCTCACTGCAACCTCCGCCTCCTGGGTTCAAGCGATTCTCCTG
CCTCAGCCTCCTGAGTAGCTGGGATTTCAGGCACGCGCCACCACGCCCA
GCTAATTTTTTGTATTTAGTAGAGATGGGGTTTCACCATGTTAGTCAGG
CCGGTCTCGAACTCCTGACCTCAGGTGATCCACCTTCCTCAGCCTCCCA
AAGTGCTGGGATTATAGGCTTGCGCCACCGCACCTGGCCTACTTGTATG
GTTTTTAGGCTTCCATTGCTGTTTGCATCCGTCTCTCCATGGAAAAGGT
GTTTCTCTTGGATAGCAATTTTGATAGTTTCCCTAGGCTTCTCCGCAGC
ATCTGGTGAGAGATGGACTCAGCAAATGTTTACTGATGGGTTGGTGGAT
CTCAGTCTGCCCCATCACACCTGAATTCAGAACAGGGCCGCCCCAGGCA
GCAGGAGTGTCCCCACCCTCAGTAATAGAGGCCCTCGTCTGTTCTTGTT
CCTCCACAG

[1017] In some embodiments, the intronic domain that promotes trans-splicing primarily in the heart comprises or consists of sequences from the gene SLC39A14. In some embodiments, the sequences from gene SLC39A14 comprise or consist of:

(SEQ ID NO: 958)
TGCAGTAGAACAGAAACTTGCGCGTCCTCTTTCCCTGGGGCGGCACAGC
TGAGCCAATCCCCTCCTCCCCTACCCTGGGCTCCAAGGCACCCAATGAC
TGCCACCTGAGAAATGAACCTGTCCCTCGTATCAAAGCCACAAACGACT
TCTAACTCTGGATCTCAGGGCCCACCTCTCACTCCTCTGGCCTCTGCAG
GTGCTGTCAGATGCAAGGTTCTTCCAATTTCCCTCCTCCTGGGGACTTG
ACAGTCTCCCCTCCCTTGTTAAGCCCCATACATAAGGCATCAAGGGAAA
GCAGCAGCTATCGACTGCCGTCCATGCCTTTGGTGCTAAGTACTTGCTC
TATTCTAAGGAGAAATCCTGGCAGTACTCAGGTCTGGGCACCAAGAGCT
TATCCATCTGGAATGAGATGGAAGGAAAAGAGGTTACCAAGTGATATGT
AGAATTGGCCTAAAAAGCGAGTGTTCTTTAATTTTGAGCAGGCCATCGT
TTCTAGCAT

[1018] In some embodiments, the intronic domain that promotes trans-splicing primarily in the heart comprises or consists of sequences from the gene RBPMS. In some embodiments, the sequences from gene RBPMS comprise or consist of:

(SEQ ID NO: 959)
CCTTAGGAGTCGCCCAGCAGCGAGACAGCTGTGGATCCCCTCCAGGCGC
ATGGGAGGCTCACAAGGCAAGGACTCTGATGGTTTTGGCTTCCACCTCC
TGTACGGTGGCCAGTGCTGTGAGGGTGGTTGGTCCCACAGGGAAACCTG
TGAACAGAGTCATGTCTGGGGCCCCAGGGACATGGCTTCAACCCCTCAC
CTGGCAGTCCTGCCTCCCAAAAGTAAGGCAGGAGTCCGGAGATTCCCAT
TGCTTGCTTCTGTGAATCTCAGGTCACTTTAGCACTTGACCCCTGACCC
CAGACTGCCTTGTCCTTGAGGCCTGGGATTCCTAAGGTATATACTGTCT
GCTCCAGAGCTGTGGCTGTGGCTATCCGGAAAACGACAGCTTTGAAGGA
CTGCAGAGCTTGCCTTTGGGGCTGTTCTGCCCAAGGCCTTCCATTGTTT
TCAGACATAAATGAAATTGTTAATCCTCTGACATTTACCTTTTCCTCTC
AACCTGCAG

[1019] In some embodiments, the intronic domain that promotes trans-splicing primarily in the heart comprises or consists of sequences from the gene RBPMS. In some embodiments, the sequences from gene RBPMS comprise or consist of:

(SEQ ID NO: 960)
TGAGGCTTTCTAGGAGCACCTGGCTTAGCTCTCACAGGAGGAGGGGCGG
ACGGGGAGGCCAGGCCTCATGCTCACAGCGCCAGCCTCCTGTGAGAGTG
GGCTGGGTCTCCTTTCCTTTCCCAGGCCCTTCCTGGAGGCGATTTCTTT
CTTTCTTTCTTTCTTTCCTTTTCTTTTCTTTTCTTTTCTTCTCTCTCTC
TCTCTCTCTCTCTCCCCTCTCTCCTCTCTCTCTCTCTCTCTCTCTTTTC
TTTCTTTTCTTTCTTTTCTTTCTTCTTTTTTTTTTCTGAGGCAGAGTCT
CGCTCTGTCGCCCAGGCTGGAGTGCAGTGGTGTGATCTCGGCTCACTGC
AAGCTCCGCCTCCCGGGTTCATGCCATTCTCCTGCCTCAGCCTCCCAAG
TAGCTGGGACTACAGGCGCCTGTCACCACGCCTGGCTCATTTTTTGTAT
TTTTAGTAGAGACGGGGTTTCACTGTGTTAGCCAGGATGGTCTCGATCT
CATGACCTT

[1020] In some embodiments, the intronic domain that promotes trans-splicing primarily in the heart comprises or consists of sequences from the gene DPYS. In some embodiments, the sequences from gene DPYS comprise or consist of:

(SEQ ID NO: 961)
GTAAGTCTAAGTTCTTGTATTCCTTGGCTTCATTGTGGAGAAAATGCAC
TAACTTGCACAGAAATAATGCTTTGGCATTAATCAGCCGCTTCTCCTTA
GATGACTTCTTTAGCTGTGCTCAGGTATTTTGATCCTGTACACAAGATA
AAGGTTTTGATGTGCAAATATTCCTTTGTTTTTCTTGGCATAGAGGATG
TAGAAGTTGTGTTGCATTCTCTGACAATGGATCTGTATATAAAACCAAT
ATGAATTTACCACTTCAGTGCCTGGCAAATGCCCGAGTTCACATGGAAG
AAAGGTAAAGCGTGATGAAGGAAATAAAAGGCTTAGTTTGAAAAGGGTT
GAATTGAAAACTCAAAATAATTACAGCCTTTTTAAAGCTTTCAGATAGA
AAAATTCCAGCACAAAGGATGTCACTTTCAGTTAGCCAAATTTTCCAGT
TGAGTTCATCTTCAGCCTATCATTCCTAGTAGATTCCAGCTTTTTGTTT
CCAATTTCC

[1021] In some embodiments, the intronic domain that promotes trans-splicing primarily in the heart comprises or consists of sequences from the gene DPYS. In some embodiments, the sequences from gene DPYS comprise or consist of:

(SEQ ID NO: 962)
GCACCACTGCACTCCAGCCTGGGCAACGAGAGTGAAATTCCATCTCAAA
AAAAAAAAAAAAAAGTGTTGTCACCTATTCTCACTCTATAATATTCTAT
CTAATGTCTACATGATTATCTCATAAATCTTAGGTCTGTAATAAATAAG
TCAGATCATAAATGTGGTATTGTCAAACTTTAAAGGAGAATCGAAAATA
CCATTACCAAAATTTAGCTGTCACCTATAACAATTTTTGTGATTCTAGG
ATGAATGGGAAGAATTAGTGTGGATGCTAAGTAGTGGGGTTTCTGAAAA
GTCATCTTCAGGCTTCCATATGTTACCCCATCATCTCCATCATTGGCAT
TATGACTGTTTAATACTTACCAGCATCCTCAGATGCTCTACAATATAAG
AAATTAGGTGCAGTTCTGTTTGTTTAAGAGATGCAAGTCTTGTCATTTT
ATCGATAGGATACTTTTTAGTATTTGATCATTAGAATGATTCTTTGAAT
TGCTTTACA

[1022] In some embodiments, the intronic domain that promotes trans-splicing primarily in the heart comprises or consists of sequences from the gene RCL1. In some embodiments, the sequences from gene RCL1 comprise or consist of:

(SEQ ID NO: 963)
TATTGGGATGGGTGAGAGGAGGAAGATGCTTTTTGGGAGTCAGATCTGT
TTAATTTTGAGCAAGTGTCTTAGTTTTTTTGTCTTAGTTGTCTTTAATG
TAAGTCCTAGAACTCGGAGCCATGGCCCTCAACACAGGGTTACTGTGAG
CATAAAGTAAGGTGATAATAGATGTGAAAGAACTTTGGGAGCCGTGAGC
TCTGTGGGATTATGTGCTAGGATGGTGACATCTCTTGTGCTTTCCTGGG
GACAGTGGGCAGCCTCAGACCTCAGAAGGACAGCACCTGCTTGGTCCAA
AGGGTATGAGATTCAGGACTGTTTGTCTAAGCTGTCTGTGGTCAAAAGT
ACATTCTGGACTGAAGAGATGGTGATGTAACTGGGCTGTGTGTGTATTG
AAAAATCCCTCTTTGCTCTTTCCTCATTTCAGGTTTGTCCTTTGAGTCA
AGTTAAATATTTATTGAGCATTTCTGAGTACAAAAGTGGTGTATTGGAG
AGTTGGGAG

[1023] In some embodiments, the intronic domain that promotes trans-splicing primarily in the heart comprises or consists of sequences from the gene RCL1. In some embodiments, the sequences from gene RCL1 comprise or consist of:

(SEQ ID NO: 964)
TAAGTTCAAGTGGAGCTAACACTTGGGTGCCGGCTGGAGGGTTTCAGGA
GAGAGATTGGGACCTCGGGCTGGGAGAATGGGGCAAAGCAGCTCAGGTT
GAGGAATTTGGTCAGTTTGGATGGGTGGAAGGAGTTGATGGTGCAGAGC
TGAAGATGGACACAACTGAGCAGGCTGGGGGCTCTAACAACAAGATATG
GGAGGACCAGGAGCCACCGAGAGACTGTCACCAGCATGAGGAAGATTGG
TCTTTTAGTATGAAGTTCAGGATGGGTCAAAAAAGGGAGCTAGATACCA
GATCAGGTCATGTATCGTCTCTGAGCACTTTGTTTCTGCAGTTCAGATG
AAAATTAAATATGTTATTGTCAGCAGTTCTTGAACATTGGGCTGGATTG
GGCAGATTATATACCTCGTTCTACCTGTTGGACTTGTCACGTGGGGTTT
GTATCAGGGTAGTGGGAAGGTCACATGTTATTTCTCCATTTTTTTAGTT
CCAAATATA

[1024] In some embodiments, the intronic domain that promotes trans-splicing primarily in the heart comprises or consists of sequences from the gene TOMM5. In some embodiments, the sequences from gene TOMM5 comprise or consist of:

(SEQ ID NO: 965)
GTAGCGGGGAGCAAGGAGGGTGCGCGTTGAAGGCGACGGGCATATGCGC
GGTTTGAGGTCTGCGGGTCAGGGTCCGGGCACTGAAGTGCACGTGGTGG
CCGGCGCGCGTGTTTAATCATCCTGGTTCTCCCAGCTTGAAGAATGTTT
GAGCTGCCGGGCGCGTTGGCTCACACCTGTAATCCCACCCAGCACTTTG
TGAAGCCGAGGCGGGCGGATCATTTGGGGTCAGGAGTTCGTGGTGGCGG
GCGCCTGTAATCCCAGCTCCTCGGGAGGCTAAGGTGGGAGGATTGCTTG
AATCCAGGAGGCGGAGGTTGCAGTGAGCCGAGATCGCGACACTGCACTC
CAGCTTGAGTGACAGAGCAAGACTCCATCTCAAAAAAAAGAATGTTTGA
GCTGAAAGAGCTCAAGTAATTATCCCTAGAGGAACTCCCTCGTTTTTGC
AGACAGAGAAACAGAGAAACAGAACCATAGTTCTAGAAGGAAGAAACAG
CCTTCTTGG

[1025] In some embodiments, the intronic domain that promotes trans-splicing primarily in the heart comprises or consists of sequences from the gene TOMM5. In some embodiments, the sequences from gene TOMM5 comprise or consist of:

(SEQ ID NO: 966)
AGGCTGGAGCGCAGTGGCGCGATCTCGGCTAACTGCAACATCCCCCTCC
TGGGTTCAAGCGATTTTCCTGCCTCAGCCTCCCGAGTAGCTGGGATTGT
AAGCACGCGCCACCGAGCCGGGCTGATTTTTGTATGACAGATGTTATTA
AAGACAGCGTGGAGAAACCAGAGCCTGCGTTGCTGAGCTTGCGGCCGCC
CGCTTCACACCGCACTTCAGATCAGCTGGGTCAGGACGTGGATTGTCCC
GTGCAGGCATCCATCGTCGAGTGTGGCAACGAGAGGGCGGGAACAGGAA
GTGAGGATAGGCCGAGTTCCGGGCGCGAGGCGGCCACCGTGGAGAGCAG
AGCGCGGCGGCTGGAAGCTGCTAAGTCAGAGCCGCGATGTTCCGGATTG
AGGGCCTCGCGCCGAAGCTGGACCCGGAGGAGATGAAACGGAAGATGCG
CGAGGATGTGATCTCCTCCATACGGAACTTTCTCATCTACGTGGCCCTC
CTGCGAGTC

[1026] In some embodiments, the intronic domain that promotes trans-splicing primarily in the heart comprises or consists of sequences from the gene CBWD5. In some embodiments, the sequences from gene CBWD5 comprise or consist of:

(SEQ ID NO: 967)
GTAACTAACCATCCCAGTCACAAAATGCCGTGAACTCTGGTGTCA
TGGGATTTTGCGGGCTGCCGGTGCCTCTTCTCCTGAGGCATTGGG
GCCTCATGATCAAGAGCAAATGTCTTTGAGGTAGGGGCTGGGTCA
CTTGCTTCTCGTATGGGTTACCTCTCATCTTGGGAGTTAATGATG
CCCGGTCCCCTCTGCGTTAGATTCCCATTTCTCAAGTGAGATGGA
AAGTTAGCCTTTGAAACAAGGCTTTGAAGCTAAGACACGCCCCCC
TAATTGTCTCTGTGACCTCTTACCAAGTTATCTTACCTTCCTGAC
GCTCATCTACCTCACCTGAAAATGGAAAAATACCTGTCACCTGTG
AAATAGGGCCGGAACAACCTACCTATTGCCATTAAAGGATGTCCC
GTCTGTAAAATGTCCGACACGTGGGGCTTTCGTCAGCAGATTCCC
CTTCCCCAGGAGCCAAAGTCCTCCAGCCAGTTGGCAGGAAGTGCT
CCTA

[1027] In some embodiments, the intronic domain that promotes trans-splicing primarily in the heart comprises or consists of sequences from the gene CBWD5. In some embodiments, the sequences from gene CBWD5 comprise or consist of:

(SEQ ID NO: 968)
CTGAGGTCCAAATAAATAATGAGGAAAAAGTAAATAAAAGTGATG
CATGAATACTAAAAATTTGGAATTACATATATAATATGTAATAAT
AAAAAAAGAAAAAATTGTCACTGGTTATCCTTCAGGTATAAAAAT
TACAATTAAAATTGTAATGTTATAACCTTCCATTCTTTCCCCTAT
GAATTAAAACTTTTTTTTTTAACGAGACTAAAAAATCAAGTTGAT
AAAATCTATGCCCTGTGGGAACTGGTTAGGTCAGGTTACCCACTC
CAGATTTCCAGCAGGCTAGCCTCAGCTCTACCTACAGCCAGTAGC
TTATTAAGGCTCTAGGCGCCAGTGACACCTTCAGACAGGTGGTTA
GTGCGCCCTAAGGGCTCTCCGCAGCGTCGCTCAGGTTCACAGAAC
ACGCCCAGGGGCGTGTCCAGCTGTCGTCGGGGAGAGCCCACCTCC
CCGGGGGGTGTGGCTAAGGGACGAGGCAGTTCTCGTCCAGAGCCC
AGGT

[1028] In some embodiments, the intronic domain that promotes trans-splicing primarily in the heart comprises or consists of sequences from the gene TJP2. In some embodiments, the sequences from gene TJP2 comprise or consist of:

(SEQ ID NO: 969)
AGAAAAGCAAGACAGACTGAGAAAGTGTGGCTTAGCCGCGGTATG
GAGGATGGATGGTAGCACAGATAGGCTGCAGGGCCCCTAATTTGA
GTTCCTGCACAAAAACGACCATAATATCAACATTGTACCAAAGCC
AAGTGATCTCAGGGAGAAAAATAAAAGATGCCTTCCCTGGCGAGC
ACATCAAGGTTTCAGTCGCTTGGCTGTGTCCTTGGGAATTTTCTT
GAGTCCCCACTCCCAGGAGCCACATCAGACCCCACTGACCGTCCA
ACACAAATTCCTCTAGATGGAAGGGATGGATGATGACCCCGAAGA
CCGCATGTCCTACTTAACCGCCATGGGCGCGGACTATCTGAGTTG
CGACAGCCGCCTCATCAGTGACTTTGAAGACACGGACGGTGAAGG
AGGCGCCTACACTGACAATGAGCTGGATGAGCCAGCCGAGGAGCC
GCTGGTGTCGTCCATCACCCGCTCCTCGGAGCCGGTGCAGCACGA
GGAG

[1029] In some embodiments, the intronic domain that promotes trans-splicing primarily in the heart comprises or consists of sequences from the gene TJP2. In some embodiments, the sequences from gene TJP2 comprise or consist of:

(SEQ ID NO: 970)
GCATAAGGAAACCCAGCCCAGAGCCACGAGCTCAGATGAGGAGGG
CTGCTAGCAGCGATCAACTTAGGGACAATAGCCCGCCCCCAGCAT
TCAAGCCAGAGCCGCCCAAGGTACGTGGCTGGGAAGCCCAGGATG
GGAAGGAAGAGGAAGCAGATGCCTCTGAAGCCTCCTGGACGGCCA
GGGAGGAGCATGCACACTGAGATGGTGTTTAATTACGGTTCTGAC
TCACTGTGTTCTCTATTAGAGCCTATCTTTTGGCCTGTTGGGTGA
ACTCCCAAATTAGGGAAGGGCAAAAAGGAAGGAAAGGCAATATTA
GGAGAGCATATGATTTTAGGACTGTTAGTGTTTATTTAATTTACT
CTTCTTGTTAAAAAAAGATTGTAAAGAAAAAGATTGAAAAATACT
GTACTGTATACCCAGAATCACCAATCGCAGAACGTGTTTTTCTTT
TGCTGTCCAGCTAAAGTTTTCTGCCCAGTCTGATTTAGATGCACC
AGAT

[1030] In some embodiments, the intronic domain that promotes trans-splicing primarily in the heart comprises or consists of sequences from the gene ALDOB. In some embodiments, the sequences from gene ALDOB comprise or consist of:

(SEQ ID NO: 971)
GTAAGGATATTGCCCACTGAGATGAATCATGCCAGTGTAAGCTAG
AAATGAAGGCAAGTAAAGAAGGAAGCAAGGAAAAACAAAACACAA
CTATTACACTGGTCTTAGAGCCACACGTACCTGGTTTTCAATACC
AGCTCCTCCATTTAACAACTGTGACCTTGGGCCAGTCACTGAAAT
ATTGTGAGCCTCAGTTCTCCTATCTCAAAATGGGGATTTCTCAAA
ATGTTGTGGGGATTAACTTAGACAATGTACATAAGGTGCTTACCA
CAGTACCTTGGACAAAGAAGATTAAACTCTGCACCCGGAAGTATT
ATTTTTAGAAAAAAATTAGCAGCAGTAGAGTGGAAAGTCCCCACA
CTTTGAGGTCAGACACACCTGGGTTTGAATCCTGGTTCTATCACA
TGCTACCTAGATAATTTTGCAAGGTACTTCTGCCCAAGTAGACAA
GCATTAACTCACAACATTGGGTTAGCTAAGCAGAATTTGAATCCC
AGCT

[1031] In some embodiments, the intronic domain that promotes trans-splicing primarily in the heart comprises or consists of sequences from the gene ALDOB. In some embodiments, the sequences from gene ALDOB comprise or consist of:

(SEQ ID NO: 972)
ACTTCTCAAAAGTGAAAACTAGTATCCATTGAATAAGAGTTTTTA
CCATTCCAAGCATTCATTTAATTCTCATAACCTCTGGTAGTAGAC
TCAATTATTACCCTTATTTAGAGATGAAGTGAGAAAACTGAACTA
CGAAGAGTAACATAACTTGCCCACACAACAAGGCAAGGTCAGAGC
CAGTTTAGGCTAATTCTCAAGCTCATGACTTTTGCCTTTGCTATG
TAGAGAGTAGAGGTTGTATCCTTAATTCTCTTTACCTCCTGTACT
AACACAACACCTGGTGCATGCAGGTGCTCAATAAATGTTAGGGTA
GACACTCTCACAGTGTACCTTCTAGGTAACTTCCCTTCTGCTATG
GACTGAACTGGGTCCCTCGCACTAATACACTTTACTAATTCAACT
CCTTGATCTGTAAAAGATGCAAACTGTTAGTTAGTTCAAGAGTTC
TGCTTGTGTTTTCCTGACATCTGACACCTGTTAATTATTTGTATC
CACA

[1032] In some embodiments, the intronic domain that promotes trans-splicing primarily in the heart comprises or consists of sequences from the gene PTGR1. In some embodiments, the sequences from gene PTGR1 comprise or consist of:

(SEQ ID NO: 973)
GTAAGTAGACCTCCTGCTTTCTTTCCTTCCCTTTTCTCCCTCCTC
TAACCCCCTTGCTTTCTTCCTGCCAAGTTTCTAGACGCCCCAGTG
GAGGAGGTTTGCTCTTAGACCTCCTCCCCTTACGTCGAAATGACC
GCTGGGTCTTGCACTCGGAGGATCTTGGGAGCCGACGTCCCGACG
CCTCCCGCCCCCGCAGTTCCTTGGAGAGCTTGGAGCCGCGCGCCG
GAGGGAATAGGAAAGCTTGGTTACAACCCGGGACACCCGGTAGCT
TCCTGCACCCGGGAGGGGGCTGGCCAGGGAACTTGCTGGACTGCA
CAACTGGGGGAGGGTAGAAGAAGAAAGATCGGGGTGGGGATTCGG
GAATGGGCAAGCGGGCGGCGGGCGGCGGGAGGCGAGGGTGGGAGC
AAAGGGCGAGCGGGCAAAGGCCGGGCGCCGCGCCAGGCCCCCTCC
TCGGGCGGGCGAGACTTTCCCGGGACCTGGCCCCTCTGCGGCCAG
ACCC

[1033] In some embodiments, the intronic domain that promotes trans-splicing primarily in the heart comprises or consists of sequences from the gene PTGR1. In some embodiments, the sequences from gene PTGR1 comprise or consist of:

(SEQ ID NO: 974)
GAAGCCAGGTCAAGGCCTGATGTTTGCTAGGGTGTGATGGGTGGG
GTGCCTCAGTGGCAAGAGTGCTCACTCCTGCCTGGGGGAGTCTGG
CAAGGGTTCACAGAGGTGACCTTGAATTGGCTGGTGGAAGGCGAG
TAGGTGTTCAGCAGGCGGACTGGGGACAGACAGGCAGGGTGTCTG
CACCGCAGCCCTGGGCGAAAGCTTGCACTGCGGGCAAGCGGCAGG
GCTGACGGGGAGCCCAGGGATCGGAGCCAGCACCGGGGGCTTATT
AGGGCTGCGGCCGCCCCAGGCCCTGCCTTTGGACCCTTCCGGCCT
GCTTGGCAGATGCCACGGTTGGTTCCCCCACGGGGCATATTTCCG
CCGGGCTCCAACTTAGGACCCCAGGCGGAGGTCCAGTGTCAGCTG
GACAAAGCTCTGTTAGGAATTTTCCTATCAGGAGTCCCTAACCCC
CTACACGCACACACACGGGCGCGCGGGCGCGCACGCACACACACG
CACA

[1034] In some embodiments, the intronic domain that promotes trans-splicing primarily in the heart comprises or consists of sequences from the gene ORM1. In some embodiments, the sequences from gene ORM1 comprise or consist of:

(SEQ ID NO: 975)
AGCCTCCTACCTCTGCTGGAAGCCCAGATCCCATTGTGTGCCAAC
CTAGTACCGGTGCCCATCACCAACGCCACCCTGGACCGGGTGAGT
GCCTGGGCTAGCCCTGTCCTGAGCACATGGGCAGCTGCCTCCCTT
CTCTGGGCTTCCCTTTCCCTGCTGGCTGTGGTCGGACCCCCACTC
CCGGCTCTGCCTTTTTCTCTTCTGGGTCCCCAGGGTGAAATTCTC
ACCAGCCCAGGGGACTCTGGAGGCACCCCCTGCCTCCAAACACAG
AAGCCTCACTGCAGAGTCCTTCACGGAGGACGGTTCTGTGCTGGG
CCTGGAGGGGCTGCCTGGGGGGCAATGACTGATCCTCAGGGTGAG
CTCCTGCATGCGCACTGCCCACCAGGGGCCTCATCTCCCCATCTG
CAAAATCAGGGAGAGATCTGCCTGAGTCTCCTCCCAGCTGACAGT
CAAAGATTCAGCATCAAGCCCCCATCACCAGCTCCCACCTTCTCC
CCAG

[1035] In some embodiments, the intronic domain that promotes trans-splicing primarily in the heart comprises or consists of sequences from the gene ORM1. In some embodiments, the sequences from gene ORM1 comprise or consist of:

(SEQ ID NO: 976)
TGAGAGCCCCCATTCCAATGCACCCCCATCTCAGCTTCTGGCCAG
AAGACCTGAGCAAGTCCCTCCTTCTTCCTGGCCTTGGCCTTCCCA
TGGGTGGAACCGGGAGGGCTGGCTTTAATCTCCACCAGACTCTTG
CCCCAGGACTGTGATGGGCGATTGGCCACTTCTCAATAATCTTCC
TGTTTTCCTTCCGCCTTCTGTTTGGCTTTAGACAGGACCAGTGCA
TCTATAACACCACCTACCTGAATGTCCAGCGGGAAAATGGGACCA
TCTCCAGATACGGTGAGGGCCAGCCCTCAGGCAGGAGGGTTCACT
GTGGGAACAGGGCAGGCCAGCATAAGGTGGGGGCTGGATGTAGAG
CCCTGGAGGCTTTGGGCACAGAGAAATAACCACTAACATTTTTGA
GCTCTAACGATGTGCTCAGAAACAACTCTAAGAGGACACTGAGAG
AATTAGAGGAGGAAAAAGAAGAACAGAGACCTCAAATAGTTTCCC
CAAG

[1036] In some embodiments, the intronic domain that promotes trans-splicing primarily in the heart comprises or consists of sequences from the gene ORM2. In some embodiments, the sequences from gene ORM2 comprise or consist of:

(SEQ ID NO: 977)
TAGTTTCCCCAAGGTCACACAGCTTATAATTAGAACTAGAATTGG
AACTCCAGGCTGGCTTCAGATCTGCCTCTCTCTCACGCCCTCTTT
AAGATCCTTTGCAAACCAATGGTAGAAGCCTGTATGTTGGAGAGG
TGGTACCTTCAACTATGTCCCCCATCACCGCAGAGGTGGCACATG
GCAGGGATCTGATGGAGCTGAACTGACATCATTTAGCATCCCGAG
CCTCCTCTCTGGGCCTCATTTTCCTCCTCTGTAAAACGGGGAGAA
AGGCCCTGACAGCCACAGTCTGTGTGAGGCTCCTGAGATCTCATG
TACAGAAAGTGCTTGGCGTGGAGCTGGGCACGCAGCAGGGGCTGG
GCACACGGTGGCCCAAAGGAGACCCGGGCCTTCACTGATGGGCTT
TGTGGCCCCGGACACACCTAGGACTCCTCACCTGTAAGACAGGCA
CCATTGTGCCATCCCATGTTCTCACCCAGAGGCTCTTTTTCTCTT
CCAG

[1037] In some embodiments, the intronic domain that promotes trans-splicing primarily in the heart comprises or consists of sequences from the gene ORM2. In some embodiments, the sequences from gene ORM2 comprise or consist of:

(SEQ ID NO: 978)
TAGGCATGCTTAGCAGCCCCAAACTCATGCCCCTCTCAGGCCTCA
CCCCCCATTCACCCACCCCTGGGCTGGCCCCTAGAACCCCAGCCC
TCCCTGGCCTCCCGCCGGGCCCCACCATGTCCCCAGTCAGTCTCC
TTGCTCCCCCTGCAGCTGACAAGCCAGAGACGACCAAGGAGCAAC
TGGGAGAGTTCTACGAAGCTCTCGACTGCTTGTGCATTCCCAGGT
CAGATGTCATGTACACCGACTGGAAAAAGGTAAACGCAAGGGATT
GGACAGTGCCCACCTTGTCCATGGCCCAACTTGGGCAGCCCCAGA
GGCCCAGAGCAGGAAAGCTGCCAGGCAAGGCTGCACAGCTAGGCA
GATCTTCTGCTTTTAGGCACCTGCCTCACTGTAGGGACAGCTGAG
CTCTACAGAGGCCCAGGGGTGGTGGATGAGAGCCCAGGAGGGAGA
AGTCCCTGTGAAACCAGGGAGGACCTGAAAGCTAACAGGAGGGAA
CAGC

[1038] In some embodiments, the intronic domain that promotes trans-splicing primarily in the heart comprises or consists of sequences from the gene C5. In some embodiments, the sequences from gene C5 comprise or consist of:

(SEQ ID NO: 979)
GTAAGTAAAACAAGCTATCTTCATTTTTCAATGCATCTTAGTTAT
GACGAATGAAGAGTTAAATTTAACAGATTCTGTTAACTTGAAAAT
AACTTGCTACTTCTGAGAACAGCAAGTGAATAGTATCATCTCTGA
ATGAGAAAGTCATGGAAGCATTTTGATTTGATGAGTAGCTAACAA
CATGACAGCTTTTATGGAATTGTTATTTATTAAAATTTACGTTAA
GTGATTATTCAAATTCCTCTTCAAAAAAGCACAAAAGAAACTCCA
GATAATAAACTTTCTTGACATTTTTTGCTTATTTTAACTTGGTGT
TTAGTTTTCTTTGTGTTTTTCATAGACTATACACAGTTAAACCAG
GGTTATTTAGGAGTCAATCTAATACTGTGATCTGAAAATCTGTTG
TTGTAGTGACTTCTACCATACATTTATGAGCTGACTTTTCACAAT
TTTTAGTGTCATTATTGAGATAATATGCATTTTAAGTAATGTTTT
AAAA

[1039] In some embodiments, the intronic domain that promotes trans-splicing primarily in the heart comprises or consists of sequences from the gene C5. In some embodiments, the sequences from gene C5 comprise or consist of:

(SEQ ID NO: 980)
CTAGGTTATGCTCAGACCATTTGCAGCACCAAGGACACTGCCATT
CAGGTCACCAAAAAAAGATCATCTTGTGAGCCCTGTCTAAACCAG
GCCCCTTCTAAAATCATTTCAGTGTGAAACTGAGTCCAGGTGGGT
CTTCATCAGTATTAGAGTGGACCTGCCAGATGTATGCTTGCAGAT
GATGCAACATCAAAGCAAATGCCCTGGGCAAGAGAAGAAAGGCCA
AAGCAATGGGCTTACTGGTTTCTAGCTTTGAGCCACTCTTCATAG
TGCCAAATTCCCATTTTAGGGTCCCTTTATTTGTATTAATAAAAA
TAAATTCCCTGGGTGTAAGTTCCTGTAAAGTACTCCCTATCTGTA
TTCCTGGGCATGAAAGGGTGTTTTAGTTCCAATTCTAGTTTTCCC
ACTTAGAGGTTCACCTTTCTGACATTAATAATTAACCAGATTATC
TGAATTCTTCAAGTTCAGTTTATTTAAAAGGAGACTATCCTCAAA
AGTG

[1040] In some embodiments, the intronic domain that promotes trans-splicing primarily in the heart comprises or consists of sequences from the gene DMD. In some embodiments, the sequences from gene DMD comprise or consist of:

(SEQ ID NO: 981)
CGTCTTCACCTCTTTTCAACCTGCTCCTCTTTTTTGCCTTAACTC
TGATGGCAGTCACACAACTGTGTGTTTTTCTTTTAATTCACTTTA
CACCTTGGTTTGGCTATTGCTTTCCATGGTTCATACTTAATTGGC
TGGATTTTATTTATTTTGACCTTTCAGTAAATTTTTTTGCGGCTG
AGTTTGCGTGTGTCTCCTTCACCACCTCATTTTTTGTTTTGCAGT
CCCGTTACTCTGATCAACTTCTGGCCAGTAGATTCTGCGTGAGTA
CTTTTTTTGCTGAAGGGTGCTGCTACCACCAACACATTCGCTCGC
TTGGTTCTCTTTTGTTCTGTTTATTTGTTTGTTTTCTTTTGTTTT
GTTTTGTTTTATGGACATATTAATTCCCCTTCCTTCATTTCAGTT
TTTTTTTTTCTTTTCTTGATGAGACTTTGAAAGTACCATCTACAC
AGATCAGGAGAATCAGAGTGGGTTTTTTGGTTCCTCCACCAGGTG
AAAT

[1041] In some embodiments, the intronic domain that promotes trans-splicing primarily in the heart comprises or consists of sequences from the gene DMD. In some embodiments, the sequences from gene DMD comprise or consist of:

(SEQ ID NO: 982)
AAAATACCATAAAGTGTGGTAAAATTTAATGTCACCTTTTTGACC
TTAAGACCTATAAACTACCATTTATTGAGTAGCCTAGTAAGCTTG
TATGTTTCTTTTATTTATCATAACAACGTGTTGAGGTGTTGTTGC
TCCCATTTTACTGATGATCAGAGCCTCTGAGAAGTAAATAACTCA
GCCAAATTAGTACATGCCAGGCCTGGTTTCAGAGCCCCATTTGTC
TGATTCCAAAGCCTTTGCTCACAACCACAACACTCTCCTTAATTA
CAAAACAAGTGTCATGGGGCAGAAGACTGGAGTGGTCATTAGTTT
TGAAATCATCCTGTCCTAAATCTGATCTCACCATGATCTCCCTTT
TAGACTACATCAGGAGAAGATGTTCGAGACTTTGCCAAGGTACTA
AAAAACAAATTTCGAACCAAAAGGTATTTTGCGAAGCATCCCCGA
ATGGGCTACCTGCCAGTGCAGACTGTCTTAGAGGGGGACAACATG
GAAA

[1042] In some embodiments, the intronic domain that promotes trans-splicing primarily in the heart comprises or consists of sequences from the gene GJB1. In some embodiments, the sequences from gene GJB1 comprise or consist of:

(SEQ ID NO: 983)
TTGCCCAGGCTGGTCTCAAACTCCTGGCTTCAAGTGATCCTCCCG
CCTTGGCCAAAGTGCTGGGATTACAGGCATGAGCCACCATGCCCG
GCCCTGTCATACAGTTTTAGAGGCTGGGAGCTAGAAGGGTTGACC
AGGATGGCAGCCTGTACAGGATCCCTCTCTGCAGCTTGCCCGCAC
TGTGGATCTGCCTAAGGCCAGGGCATGGGGGAAGCCTGAGGGATG
CTGAGGAGCACAGGTCCAGCTCAGTCTCCCAGAGAGACTAAACAT
GGGTGGGTGACAATGATGCCTCTCTTCCTCTGGGACAAGGCAGTG
ACTCCAGGCTATGTGATCTGTCTCTCCAAACCCATAGGGAGCTCA
GAGGATCAATCTTGTTTAATGATTGTATGTGGGAGGAGGTGGGGC
TGGTTAATGTTTGTCTGGTTCCTCTTGGGCTGTGGGCCATTTCTG
GCTCTGGCCCTGGGTTCGTTGTCCCTCCCCTGGGCTGGGCTGACA
GTAC

[1043] In some embodiments, the intronic domain that promotes trans-splicing primarily in the heart comprises or consists of sequences from the gene GJB1. In some embodiments, the sequences from gene GJB1 comprise or consist of:

(SEQ ID NO: 984)
TGAGGAGACTGGGGGCTGAGGGAGGTGGGCCAGGGAGGGCTGATG
TGGCACAGTGGGCCGGAAATAGGGGCCGGGTCTTGCCTTCTACTG
ACCTCCGCCTTCAGCCACTTAGGTCCCTTCCATGCTTCCCTCTGA
AGCTGGGGTGAGGCCCCTCCTGCCAGGTGCCAGACTTGCTTAGCC
TCTCTCTGCAGCCTCTTTCCAGGTTCAACATTGCTTTTCCTCTCA
CTTTTTTTCCTCTGGCCAAAGATTCCCCTTATTCCCATAGGGCCA
GATTCTCAGGAAGACTTGAGGGACCCCCTAGGTGCAAGGTGGCCA
AGTTTGTCTCTCTGAGACATTTCCTGCCACACAGGGTTAGGGTTT
AGTGGGAATGTTGGGCACTGCCAGGTGCTGTTTTCCTTCCTTGAT
TACAAGGCAAGCCAGGCATGCACCCAACACGGGGCTGCGAGTGGA
TGAATAAAGCGTGCTCAGCGGGCTGCAGAGGGCTAGCCAACAGGG
CCAA

[1044] In some embodiments, the intronic domain that promotes trans-splicing primarily in the heart comprises or consists of sequences from the gene TXLNGY. In some embodiments, the sequences from gene TXLNGY comprise or consist of:

(SEQ ID NO: 985)
AGAAGAAATTGTCCTGGATCATACAATAAGCTAGGATTTGCTCCA
GACCATTTTTTTCATTTTATCAGGCTACCTACAATTAAGGAATTT
CAGAAGATTTTGTGAACAAAAAATGTCCAGGAATTATGTGTGTAA
TAAATGAATTTGATATTTTGATCTCCTTATCCATCTTTTTCTTGA
TAAAATATCAGCTTTTTTTTTTCCAATGTAGGGCAGAAGCAAGAA
GTACAGATATTTTGATGGGGACAGCCCACGTCTGATAGGGTGGGA
CATGGGGCAGCAGTTAGAGGGTTGTGCTCTTTCTAGTGTGGGATA
GTTTGCAAGATGATATGTTGTAGCCACTTCTGCAGTGACGGGGAC
AGAAGGAGTCAGTGTTCTTAACTACAGTGGTAGCAGCAGAAAAGA
AGGGTAAGCAGGGTTCTAGAAATTTGTGTTATGTTTTCTCCCCAC
TGTATTTATTTCTTTGGTTAGTGGTGCAAGAAATTCTGTTTTCCT
GTAG

[1045] In some embodiments, the intronic domain that promotes trans-splicing primarily in the heart comprises or consists of sequences from the gene TXLNGY. In some embodiments, the sequences from gene TXLNGY comprise or consist of:

(SEQ ID NO: 986)
TAAGTTCTACTTCTTGGAAAAAAAAAAAAGATCGCCAAAATTGTA
ACCAAAGCCATTTAAAACAAACTCCTCACTTAACATAGTGCCAGG
GCATGCAATTTTGTTTCTTACTCTCTGGATGTGGGATATGCGAGT
GTGTGTGTGTGTGTGTGTGTGTGTGTATTAAGCTTTCTGTTTCTG
ATGAAATTTTCATATGAAATTTACTGGAGATAAGATTAAATTAGT
GGAAAAACAAGATAATTTTGCTTTCTATGTAGTGGTCACCAAGTT
AAAGAATTGTGCCAGTTATTAGGCAAGATAGGCTTTGAGATTTAG
GGACAGTTAAATTTTACACCAACTTAGTGAACATGAGACTTCTAC
CTAGTGTTACATTTCATTTTTAAATAAGCAATTTAAAAATTGGTA
AATGATTTGTTTACTTTGATTATATTCTGGTATAATTTTCTGACA
AAATTATCTGTGTCTTGGTCAGCATTGTTGCTAGAATATGTATTC
AGAT

[1046] In some embodiments, the intronic domain that promotes trans-splicing primarily in the heart comprises or consists of sequences from the gene MICU1. In some embodiments, the sequences from gene MICU1 comprise or consist of:

(SEQ ID NO: 987)
GTACTTTTTAAATTGATCTTTGAAGGCTTGGGCTCTTTAATGGTA
GTTTATAAATTATTAAAATTTATTCATTAAAATATTACTCTCACA
TTTCTGGTGGCTGGCAGTCTTAAAAATATAAATTAAACTGAGTTG
TAGTAATTAAATATAAATTAAGCTGAATTATAAACATCTTTTGGT
TTAAAATAACTAATATAACTAACGAAGACCACAGGGTGCTCTTTA
TTTTTACAGTACATTTTTTCTATACTTCCTTTGTTTGAAAAATGG
GGTGTAATTTTTGGTAGTCCCTCTTACCAAACCCTCAAATTAGGT
ATCTTATTATTAGTACAATGGATTATCTTCCTAAATACCTTTGTC
TTTAACTGCATTCTGAACCAAACCAACAAATACATTAAAAATTAT
GTCAGAATAACGTATAGACGATTCCATTATCAATGTTTCTAATCC
TGGGAATTCTATTTTAGAACAGCCATGGCACAAACATCATACAGA
GTAC

[1047] In some embodiments, the intronic domain that promotes trans-splicing primarily in the heart comprises or consists of sequences from the gene MICU1. In some embodiments, the sequences from gene MICU1 comprise or consist of:

(SEQ ID NO: 988)
AGGTTAAGAAATTTTGTTGTAATCACTCTTGTTAAGCATAAGAGA
TACTTAATTAATTGAGTCACTTAAATAGTCTTACTTGGAGGCCGG
GTCTGGTGGCTCATGCTTGTAATCCCAGCACTTTGAGAGGCAGAG
GCAGGAGGATCACTTGAGCAACCGGGAGTTCAAGACCAGCCTGAG
CAACATAGCAAGACCTCATCTCTATGAAAACATTTAAAAGCAGTA
GTAGTCCTAGCTACTCAGGAGACTGACGTGGGAAGATCGCTTGAT
CCCAGGAGTTGGAGGTTGTAGTGAGCTAAGATTGTGACACTACTC
CAGCCTGGGTGACAGAGTGAGACCCTGTCTCTAAAACAAAAACAA
AAAAGTCTTATTTGGGATATTATGTTCCTACTTGAACTGTAACAG
GACTGATGAGACAACAGTAACTTCAAGTTAAAAATTAATCTTTTT
TTCTTTTGAAATTTCTTACATAATAAATACAAATAAGCAGTTGCT
TGGT

[1048] In some embodiments, the intronic domain that promotes trans-splicing primarily in the heart comprises or consists of sequences from the gene VDAC2. In some embodiments, the sequences from gene VDAC2 comprise or consist of:

(SEQ ID NO: 989)
GGCGGCCAAGCCGGAGGCCCGCGCCGGACTCGGAGTCGGCCCTGG
CTTCCTAAGATGGCCGCGCTGCCCCGCGGCCCCTCGCCCCTCTCT
GCCCGGGATCTCCCTTTGGCCCTTTGACCCCAGCTTACCGCACTT
CTTGTCCCTCCCGCAGATTCCCCTCTTCCCGCGGCCTCGCCATGG
CGACCCACGGACAGACTTGCGCGCGTCGTAAGTAAAGCTGGGATC
TCTGCGGGATGGGGCGGCGGAGAGTCGAAGCCTGTCGACCAGAAA
CCCAGTTTGTTTCCCCCTATCTTTCCAAGAACTTGGAAATTCGGC
TGCTTTTGGTGGTCGCCCCACCGTCTGACCACCTCCTCTGCGGAG
GAGGGGCTGGGCTGCTGGATTTCAAATGGGGAACAAGGCCCGGGG
AGTTGGTCTGTGGCCGCATGGACTTTTCAGCCTTTGTACATGTCT
TTGACGTATAGAAGTAAAAAGTTGTTAATTGGGGATTCTGCCTTT
GGAG

[1049] In some embodiments, the intronic domain that promotes trans-splicing primarily in the heart comprises or consists of sequences from the gene VDAC2. In some embodiments, the sequences from gene VDAC2 comprise or consist of:

(SEQ ID NO: 990)
TAAGTTTGAAGCGCTATTTGATATTTAGTTGATGTAGACATTTGA
GTGAAACACACATGGCAGTATTTTTTCCAAGTTTCAATATTTAAA
TTCCCAGTATTAAATTCTCTTCCCACTCCAGGGTGTTGGTTTTCC
CCTCAGCGAAGATATTAAAGGACGTATCAGGGTAAAGGGCCTAGT
CTTAGGTTTCGGTTTTATCTAATTTAGTTAAATCAGCTCATCTCA
GTGAATTTTGGCAGATACATAAATATCCATACACACAAATACTTG
TTTGATTCTTTGTACTTGTCCAGTCCTAGGAAGTGAGGCTGTAGG
TAATAGACTGTTTTTCCGTTTTGAAACGAATTCCCCAAGTTTGTA
TAATCATGGTTATCTGTTTTAGAAATAATTCGTTGGTGGTATCTC
CTTTATGGGTCGTTATAGTTCTATTGTAGCTCCTGACCGCATAAA
AAACATTCCAACAAATGGGATTGCTTGAATTTTAATATCAGCAGT
GGGT

[1050] In some embodiments, the intronic domain that promotes trans-splicing primarily in the heart comprises or consists of sequences from the gene CYP2C8. In some embodiments, the sequences from gene CYP2C8 comprise or consist of:

(SEQ ID NO: 991)
GTAAGTCTGCCTTATGTTCCTCCAGCCAATTGCAAAGGGTAAGTT
ATTTGACTGCTATTTTTAGACAAAATATATTCCTGGAAGCACACT
ATTATAATAGATCATTGTAAAGCAAAATACTCCCTCTGAACTTCT
TTGATGTTTCTTTTGTCTTCCTATTTTTTTTTTTTTTGAGACGGA
GTCTCGCTCTATTGCCCAGGCTGGAGTGCAGTGGCACTATCTCCA
CTCACTGCAAGCTCTGCCTCCCAGGTTCACACCATTCTCCTGCCT
CAGCCTCCCCCGAGTAACTGGGACTACAGGTGCCCTCCACCATGC
CCGGCTAATTTTTTGTATGTTTTAGTAGAGACAGGGTTTCACCGT
GTTAGCCAGAATGGTCTCAGTCTCCTGACCTCATGATCTGCCTGC
CTTGGCCTCCCAAAGTGCTGGGATTACATGTGTGAGCCACCGTAC
CTGGCCTCTTTTGTCTTTCTAAGTCTGTCATTGTCAGAAATAGCG
GAGT

[1051] In some embodiments, the intronic domain that promotes trans-splicing primarily in the heart comprises or consists of sequences from the gene CYP2C8. In some embodiments, the sequences from gene CYP2C8 comprise or consist of:

(SEQ ID NO: 992)
TATACATTTATTAGCTAATAATTTGATATATGTATGGTAATTCAA
CATGTATGAGTTATATTCACTATTTCATGTTTAGGCAGCTGTATT
TTAAGTGAACTATACTAAATATTTGAAAGGCTTTTGTTATCAAGG
GCTAAGTCTCCTATTTTTTGATATAGCATTACAATGTACATTTTT
TATACACAAAATATAGAATACACTGATTTCCCTCAAGGTCATAAA
TTCCCAACTGGTCATTAATCTGAGAATATTGAATTTTGAGTATAT
TCTAACATAGAATCATTTACTTCAGTGTTTCTCCATCATCACAGC
ACATTGGAACAACCAGGGACTTTTAATTAAAAATACCTGGGCTCC
AATCCAATACAATTAAACCAGAATCTCCTAGATTGGCACTGGAAA
GAAGGAGTAGGACAAAAGAACATTTTATTTCTATCCATGGGCCAA
AGTCCACTCAGAAAAAAAGTATAAATTGGATCTAGGTGATTGTTT
ACTT

[1052] In some embodiments, the intronic domain that promotes trans-splicing primarily in the heart comprises or consists of sequences from the gene GPAM. In some embodiments, the sequences from gene GPAM comprise or consist of:

(SEQ ID NO: 993)
GTGAGTGAAGACCCTTCAGTGTTGCCTGGTCTCTTTTCTTGAGCG
TTTTCATGAAAACGTAACCCCCCGTGTTTTTCTGTTAGATAATGT
TTGACCCATTGTTGATACTTTATATTCCACTCCTGGATTTCAGTG
ACCACCAAACCAATATGTCATTTACTATCTTGGTTTGCTCTCTGG
GTCACTGCTCCACTGAATCTATCCTGCAGCTATGAGCCATGATAG
GACAGATTGCTCAATGTTCTCAGGCAGTCACATCCAAAGCTAGTG
AGCACGTATTGTGTGTGAGGCACTGGGTCAGTGGTTTGTAAATAA
TTAACACACCCACCTGTAGATGATGGAACCACAGATGGTAAGAGT
CAGAAGCAGCCTTAAAAATCATCTGCTCGGCCAGGTGCGGTGGCT
CACGCCTGTAATCTCAGCACTTTGGGAGGCTGAGGCGGGCAGATC
ACGAGGTCAGGAGATCGAGACCATCCTGGCTAACGTGGAGAAACC
CCGT

[1053] In some embodiments, the intronic domain that promotes trans-splicing primarily in the heart comprises or consists of sequences from the gene GPAM. In some embodiments, the sequences from gene GPAM comprise or consist of:

(SEQ ID NO: 994)
GCCTAAAACACATAGTGGTATCTGCTTTAATTTGGGTGATAGCCC
CTTGCTTGAGGGAATGTGGCTATAATTTTAGTTTTCAAACGAAAA
TGTAATCTCCTGTTATATCACTGTTTACAATGAGTAGTTACTGAA
TTACCGTTTGTATAGCATTACCCTTATTTTTCAGGAGAGGTAGAG
TGTCTTGCTATCCAGGAGCTGAAAATCTAACTGAGATGAGACATA
CACAGAGCAGCAAAGTGAGTGGAGGGCCTCATTTGTGATTAAGAG
AAAAGAGAGGAAGGAGAGAAGAGGGGGCTTATGTCTTTGGAGAAG
GTTTTTGATGCAGTTGGGATCATATGGAATCATAAGAATTTAGTC
TTATGGGATTTACTTAAATTTCTCCAAATACAGGCCATTATTTTT
GATGTATTAATAATCTCTTAAGGTTATTCAAGCCAGTTGAAGTTT
TTCTTGGAGACTTTGAGCTGGCAACTTCATTGTTGCTTTTCTTTT
CTTA

[1054] In some embodiments, the intronic domain that promotes trans-splicing primarily in the heart comprises or consists of sequences from the gene ACSL5. In some embodiments, the sequences from gene ACSL5 comprise or consist of:

(SEQ ID NO: 995)
GCTACCTATTAGCTACATAAAGTATCTTTCTCTCCACCTCTTATT
TCCTACAGGTGACCCCAAAGGAGCCATGATAACCCATCAAAATAT
TGTTTCAAATGCTGCTGCCTTTCTCAAATGTGTGGAGGTCAGTGG
TCAGTTGAAAAAGAGGCTCTCATTAAAATGTGAATCTGTCATAAG
ATTTTTATTTTTGAGGTTAGAGCAGGCAGACACACACACACACAT
ACACACACACACACACACACGTTAAAGGCTGGAGTGTGGACAAAC
ACCAGCGTGTTCTTTGTTTAGAGGACTGTACATTTTCAAGCGTTG
GTCTTTTAGGATCACTGCAAATTTCTACACTATATGCAGTTCAAG
GCATCTCAGATCTACACAGTGTACCGCCTATACAGCTGTCTGTGG
TAGTCCTGGGAGGAGGTAGTTTTAAAATCTCCATTGGAATTGAAA
GTTGGCATTAATCTCATGTTGCCTCCTCTTACTTCCCTGGCCTAC
ATAG

[1055] In some embodiments, the intronic domain that promotes trans-splicing primarily in the heart comprises or consists of sequences from the gene ACSL5. In some embodiments, the sequences from gene ACSL5 comprise or consist of:

(SEQ ID NO: 996)
TGAGTGTTCTGTGTTCCTAGCAGTATGTGGCAAGGGGGTCCTGAC
TTGCTATCACATGTTTATTCCAAAGGCAGCTACACAGTATTTACT
GTTCTTTCTCCGGTGTGAGAGGTGCAGGCAAGGAGTTGGCTCATG
GGAGCCCTAATCATGGCATGGCCCCTCATTTCCTGCAGAGTCTTC
CTCTGCTAAGTCTGCATGTGTCCAGGGAGGATAGTACTTGCTCCT
GCCTTCATGGGGGTGTGTGAGTCTAGTGACATCACAGCTAGGAGC
TTACTATCTATCTGCCCTTAATTCTGAGCTGACACAAGACATTGT
CTTCTTTTTAAATTTTATTTTGGTTAGAATTTTTGAAAAGATCTA
GGATTAGAGAAAAGGAAGTTCCCTACAGAGGATCAGGGAAGGAGC
ATTTGATCTACATAAGGTGTGAGATGTCCCCCGCGCCGGTTTTTG
CACACCTGAGTGTGTAAGGTGGTGCTGTCAGCATGGTGCATACCG
GAGG

[1056] In some embodiments, the intronic domain that promotes trans-splicing primarily in the heart comprises or consists of sequences from the gene HABP2. In some embodiments, the sequences from gene HABP2 comprise or consist of:

(SEQ ID NO: 997)
TGAGGTTTAAAACAAAACTTTTGAAGCCAACAAGCAACTGTGGGC
AACACTTCAAAGGGCCCAGAATCAATGTTTGTCAATAGCAGTTTT
GCATCCTTTAATTTATGTCTCATGAATATAAAGTGTGATGTTATT
AGGAGCCCATCCATGCCTTAATTCTGTTTGAGATTTGATGAACCA
GAAGTCTATTAACATTCTGTACAAATCAGCACTGGCAGAGGCCTG
TGGCACAGGCTTCACCTGATCTTTTATCCTGAGGCTGGGATGCTA
GTCACGCTGTCAGGCTTCCTGCTCGGAACACCCAGCAGCTGTCAT
GTGCACCGTGGAGCCAGGGGGCTATGTCAGCTACTTTCTTTGGAG
AGTTTCTCCCCAGAAGAGAAACCACTTCATGACTCAGCCCAGCCC
CAAAGTTGCCATTTGTTTAATCAAGATAGTTAGTTTGCAAAACAT
TAAACATTAAACAGTATTTGATGCCTAGTTAATAATTTGCATCCT
CTTC

[1057] In some embodiments, the intronic domain that promotes trans-splicing primarily in the heart comprises or consists of sequences from the gene HABP2. In some embodiments, the sequences from gene HABP2 comprise or consist of:

(SEQ ID NO: 998)
TAAGTGTTCTTTTCTAATATTTGTAGTTGAGAGACTCCGAAGTTT
ACTAGGAGGACCAAGCTAGGCTGGGAGTGATGAGAAACTTTAGAG
TGAAAGGCTGGAGTTGCCAAGTTGGAGATGTTCTAACTACAAGAA
CCAATGCAGGCCTGTGGCTTGGTTTCTTTTGAGCAGCCACTCCCA
TGGGAACAGGTGTCTGACTTGAGCCATCTTGGAGCGGAGCCTCCA
TGAATGCATTCCAGCAAAGGAGACTGGGGCAAGAAAATGTGCCCC
AGGGCATGGATTGTAATCTGTCATGGATCTCATAGACCCCTTTGA
GAAGCCATGGAAAGCTATAAACTCTCTCCCCAGGAAAATATACCT
ATCTATTGGTGCTGACACACACAGTTTTCCAGCGATTTGTGGCTG
ACACTAGGGTAAGAAGCAATGTGCTATGGCCTTAGAGGGGAAGCC
TGCTGACTGCAAAAGATCCTGGCAGTGGGTCTGCATAAATAGTTT
GGAT

[1058] In some embodiments, the intronic domain that promotes trans-splicing primarily in the heart comprises or consists of sequences from the gene IGF2. In some embodiments, the sequences from gene IGF2 comprise or consist of:

(SEQ ID NO: 999)
GTAGGATTTGAGCTGTGTTTCCCGCCCTGATCCTCTCTCCTCTGG
CGGCCGGAGCCTCCGTAGGCTCCAAGCCTGGCCCAGATTCGGCCC
GGCGCAGCCGGCCTTCCGCGCGTCCCGCACCTGGCGGGGGCTCCG
GGGCTCCGGCGCGGCACCGGGGGGCGCTCGGGATCTGGCTGAGGC
TCCAAGCGCCGCGTGGCCGGCTCCTCCTGCTGGGGCAGGTGGCGG
CTGCGCGCCCCGCCCGAGCCCAGGGGCCCCCTCAGCCGCAACAAC
CAGCAAGGACCCCCCGACTCAGCCCCAAGCCACCTGCATCTGCAC
TCAGACGGGGCGCACCCGCAGTGCAGCCTCCTGGTGGGGCGCTGG
GAGCCCGCCTGCCCCTGCCTGCCCGGAGACCCCAGCTCACGAGCA
CAGGCCGCCCGGGCACCCCAGAAACCCGGGATGGGGCCCCTGAAT
TCTCTAGAACGGGCATTCAGCATGGCCTTGGCGCTCTGCGGCTCC
CTGC

[1059] In some embodiments, the intronic domain that promotes trans-splicing primarily in the heart comprises or consists of sequences from the gene IGF2. In some embodiments, the sequences from gene IGF2 comprise or consist of:

(SEQ ID NO: 1000)
CCGCATCTGCTGCTGTCCCGCCGGTGCTGGCGCTCGTCTCCGGCT
GCCGCCGGGGAGGCCGGCGTGGGGCGCGGGACACGGCTGCGGACT
TGCGGCTGGCGGCTGCGCTCGCTCCTGCTGGGCGCCCCGAAATCC
GCGCCACTTTCGTTTGCTCATTGCAAAGATCTCATTTGTGGGGAA
AGCGGCTGGAGGGTCCCAAAGTGGGGCGGGCAGGGGGCTGGGGCG
AGGGACGCGGAGGAGAGGCGCTCCCGCCGGGCGGTAAAGTGCCTC
TAGCCCGCGGGCCTAGGACTCCGCCGGGAGGCGCGCGCGGAGCGC
GGGCGAAGTGATTGATGGCGGAGCGAGGGGGGCGAGGGGGGCCAG
GGGGGCGCGAGATTCCGCCGGCGGCCCCTTCCCCTTGGCTAGGCT
TAGGCGGCGGGGGGCTGGCGGGGTGCGGGATTTTGTGCGTGGTTT
TTGACTTGGTAAAAATCACAGTGCTTTCTTACATCGTTCAAACTC
TCCA

[1060] In some embodiments, the intronic domain that promotes trans-splicing primarily in the heart comprises or consists of sequences from the gene PSMA1. In some embodiments, the sequences from gene PSMA1 comprise or consist of:

(SEQ ID NO: 1001)
GTGAGAATATCTTTGCTTTTTGATAAAACACAGAATGCATAGATT
TCACATCTCACTATGTGAGCCCCCACAAAACAAAACCTAGAGGAG
CATGTGAGAAAAACGCATCTCTAGGCTAGAAAACAAAAAGAGAAA
AAAAGAAAAATGTCTGTGTAAGAAAGCAAAGGAAAGAAGATGCTC
AAATCCAGCAAATCATACCAGCCTTGTCATAGGCACAAAAAGAAA
GGGATTAACCTAAGTTACAAGGTGAATTATCATAAAATCAGATGA
ACCTTTCTGAAAAATAGTCATGGGACAAAGGAGGGATATATAACA
CTAGAGGCTTAACCCTTTCCTGCAGAGAAAAAAAATGTAACTGAA
AGAAATGCCACTCAAGGCTTGTGACATTCAAAGTGAAGACAAGAT
AAGGTCTTATGTAGTACATGACATAGGTGTAGACACTCACTAGAC
TGAAAGGAGTACATGTTTCCAAAGCAGCTTTAATTCACGTCTCTG
CTGA

[1061] In some embodiments, the intronic domain that promotes trans-splicing primarily in the heart comprises or consists of sequences from the gene PSMA1. In some embodiments, the sequences from gene PSMA1 comprise or consist of:

(SEQ ID NO: 1002)
TGACCTAATTGTATTCATTTGTCAAGAGGCCGGTTCCATATCGGA
GACAGGCTGTATTCATAGATGATTTTAAGGACAGTTTAAGGCATA
GAGTTTTACTCTAAAAACTGAGAAACAAAAAATCCTTCATTGTAG
AATTTGTTTTGTTGCCCTAGCTCTACTATTTATACTTTTCCACTT
TAGCTATGCACAGAACATAGCTAATTTTCATCTCAATTTTTCAAT
TCTTTTGCTATATAATTGTTAACATTTATTGACCACTAACCTCAT
TTTAAGGACTGTGCTAAGTATTTTATATACTTTCCTGGGGAGGCA
CTTATTCCTCACTTTTGATATTTCCCTCCACGTGGGGAACATCCA
TTAGAGTAACTCTCCTGGCCTGTATCTACTTACCCCCAGGAGAGG
AGAAGAGAGTTTGGTGAGTTTGAGATGAGGAACAGGATGTCTGAT
GAAGATCTAATATAACTCATGTTCCTTTTACCTTCTCCATTGTCT
TTCA

[1062] In some embodiments, the intronic domain that promotes trans-splicing primarily in the heart comprises or consists of sequences from the gene DEPDC7. In some embodiments, the sequences from gene DEPDC7 comprise or consist of:

(SEQ ID NO: 1003)
TGCCTTTATGGTATTCACCATTCATTGTTAATTCCTAGTCTTGCT
TTTGCTTTTGGAAATAATTTTGAATAAGTGCACTTTTTAACTCAA
ACTGTAACTTGAGTTTTGTTCCCTTTAATATAGTCATATTTGGTC
AATTAAAAGCAGTTTTTTTCTTTTGGCTAAAGTGAATGGGAAGAC
GGAAATAGCTTTAGAAGCTACCCAGCTCCTTCTAAAGCTTTTAGA
TTTCCAAAATAGAGAAGAATTTAGAAGACTACTGTATTTCATGGC
TGTTGCAGCAAATCCTTCTGAGTTTAAATTACAGAAAGAAGTAAG
TCTTTTGTTTAACTGTTAGTTGTATTTAATATCCTTAATACTTAC
AGGTTAAGTATTAGATTATTCCATCTTCAGCATCAAGTATGCTGA
AATGTATAATAGCTATTAATATTTAATATTCCCTTTTATATTAAA
CTTGTCTCTTAAATATATACTATTGGATATATTTGTTTTATTTTT
ATAG

[1063] In some embodiments, the intronic domain that promotes trans-splicing primarily in the heart comprises or consists of sequences from the gene DEPDC7. In some embodiments, the sequences from gene DEPDC7 comprise or consist of:

(SEQ ID NO: 1004)
TAAAATTGTGAAAGTAGTTAAATTGAGCTTATGTAATAGATCACT
AGATTAAAATGCATTTGAATAATGTCCCATGTCCCTTCTTTTTCT
TAAGATTCCTGGAACTCTACATAAAATTGTAAGTGTTAAGCTTAT
GGCCATACAGAACGGAAGAGATCCAAATAGAGATGCAGGTAATCT
GAGAAATATTATTTTCATGATCTTCCAAAGACAAATTTCAGGTGT
TTTTTGAAAATGTTTTGCTATAAGTAGTTGGACTTTAATTTCAAC
CAAATTTAAAACATTCTCCTCAGAGTTATTCATACAAAGCAACTT
TACAAGTGTTAGAAAGTCAGCAGTGCTTACCATCTTCAGTGCATA
TTACAAAATGGGGAAGAAAAACATAAAGACAAGAATATTGCTTGA
TTTTTCTGCTTAAATATGAGGAATTGAGTCATTAACTGAACTTTT
TACTTTTAAACTTTAAGGATATATTTATTGCCAGAGAATTGATCA
ACGT

[1064] In some embodiments, the intronic domain that promotes trans-splicing primarily in the heart comprises or consists of sequences from the gene CTNND1. In some embodiments, the sequences from gene CTNND1 comprise or consist of:

(SEQ ID NO: 1005)
TGAGAGAGGAGACCACAATAGAACACTGGATCGATCGGGGGATCT
AGGCGACATGGAGCCATTGAAGGGAACAACACCCTTGATGGTAAA
TTCTCTTTATATACTGCTATCTGTCTAAGGCTAGTTCTATTTTGA
AGCCTATGTGTTTTGTGAAACACAAAAAAAAGTACAGAGAAAGAT
CGCATCCTTTTCTGGTAGGGGTTTTCAGGAAAAAGTAAGAGTTCT
GACTCATGTTGGGATTTCTTGGGCCGTTATTCTGCAGTGGTCAAA
ATGGGGGAAGCATGTCTGTAAAAGTGTTACTGATATGACTAACAC
TAACTGATCTACTTTCAAACATTACCTTTTTCCTCTCCCTCCCTG
TTTATGAATGTTTTGCCCTTCTCTTACTATTATATCTTGTTTTGT
TTGAGTTTACAAATTTTCAGAGTTTCCCTAGCTCTGGCACACACT
CATGAGGTTCCTGTCTCTACTCATACTAACAAATTGCATGTGTTC
ACAG

[1065] In some embodiments, the intronic domain that promotes trans-splicing primarily in the heart comprises or consists of sequences from the gene CTNND1. In some embodiments, the sequences from gene CTNND1 comprise or consist of:

(SEQ ID NO: 1006)
TATGTCCTTCAGTCACCCCCAAGATTGTTCTTGAGGAAGGAGGCT
CCTGAGTGCCAGCAACTTGTCAATCACGCTAATCTGATCAGGCCA
GAGACTAAGTAGTCTCAGCCACATGGGGCTCGAGGGGTTCTGCTT
TTGTGATTATTACCTCTTACGAGTCTGGGACATGCAGCTGGTGAT
CTGATTCTCCGTTATGTGCTGCTTTCCTTTCTCCAGATTTGCTCA
ACTTTTTTGGGGGGGGTCTCCTTAATCCCAACCCCATTAACATTC
TCTCTTTCTCTTTTTTCTCCACAGCAGAAGATTTAGCACCACTAT
CTCCGTTCCATCTGGGCTTATATGTACTTTTATTTTTTGGTGGTG
AAATTGACTGATGATTTTCCTTTTTCTTCGCTGGACTATTGTGCC
AACTGCCAGGCTGCCTCCTGCCCTTACAGCCCTAAGTGGCTGCCT
TCTTTCCATCAACTCCCAACTTCTTCCTGTGAAGTTTAATTGTCT
CAAC

[1066] In some embodiments, the intronic domain that promotes trans-splicing primarily in the heart comprises or consists of sequences from the gene MS4A6A. In some embodiments, the sequences from gene MS4A6A comprise or consist of:

(SEQ ID NO: 1007)
GTGAGCAAGGTTGGAGGTGATTCTGCCCCTCTCCCCAGGCTTTCT
GTGTGAGTCCATTCCTCCTCTCAGATTTATTGTTAGAACTTAAGA
CAAGCCAATTACATTTCATAATGTCTGTGTCATTCAGACGCTGAG
AACTAATCCAGCCTTCTAAATGGTGCTTCTTAACTCCTTTCTTCA
ACAGGAGAGTTAATGTGTGGAATTAAGTGCAGAATCCATGGCCCT
CTGTGGTGACGGTGATGGTTCAGGTTGTGTTTCTGGGTTCATTCT
GGAAGCTCCCCCAAGGAAAGGAGGAAGGAAGCTTGCAGGGTGGGG
CTTTGCCATTGCCCTGACTGGCTCTGGTTTCCTTGCCTGATACAT
TGAAGTCAGCTTCCAAAGAATGCCACCCAAGGTTTTGAAGGGGCA
CAGTGCCTCTGTCCTCACAAAACCAGCCTGCATATGAGTTTACTG
AATTCATTTAGGTCCTGCTGAATCTTTCCCATTTGTTCCTTCTCT
GTTT

[1067] In some embodiments, the intronic domain that promotes trans-splicing primarily in the heart comprises or consists of sequences from the gene MS4A6A. In some embodiments, the sequences from gene MS4A6A comprise or consist of:

(SEQ ID NO: 1008)
TTCTGGTTGTTACACATAGGGTGGGATTGTGCTGGCATAGGCCAG
GGAGTCTGCTAAGCATCCTACAGTGCACAGGATAGCCACCTACTG
TAAAGAATTACCCAGTCCAAAGTGGCATTAGTAGCTTTTTTGAGA
AACCTGTCCCAGATCATTAATCAGAACGTGTTATTGATATACCAG
TCTTCTCCCTTGTAGTTAGGTTGGTAGAATTCAGACTCTGGAAAA
AACTGGGAATGTAAAAGGCTGAATGAGTGTAAGCTGAAAGACAAG
AGAAAGGAGAATTGTTTTAAGCTTACTAAAGCCAAAATGGAAAAA
AAAAGAGGGGGGAGGATTGGGGGGTGAGGAAGACAGTCAACAGAC
CGCTTTTAGGCCATCATTCCGAAGGGTTCTGTGCTAGGAACCTTA
CACGTGTTGTCTCACATAATCCTTAAAACTCAGAAATGATTTTAA
ATTAAATAGCACAGAGAGGAAAACTGACTGGAGAGGGAGCCTTTG
CTTA

[1068] In some embodiments, the intronic domain that promotes trans-splicing primarily in the heart comprises or consists of sequences from the gene SLCO2B1. In some embodiments, the sequences from gene SLCO2B1 comprise or consist of:

(SEQ ID NO: 1009)
AAAATGGGGCTAATGTACACCTCGCTCATAGGAGTGATGTGGGGT
TGCAGGGCAGAGTTACTGAGCCCGTAGTAAGCGCTCCATAAATGC
CAGCCACTGGTGTTGTCTGGCAGGAGCTGGCGTTACAGTGGTTGG
GGATGCTGGGGAAGTGTCTGACTGTCCCAGCTCCAGGTCTTGCCA
ACTGTAGGAGTAAGGGGAGAATTTGATGGGACCAGTGGGTGGAGG
AAGAGGAGTGATGTCTGTGACCAGAAACATACAGAGGTCAGCACA
GGACCCTGATGGTCAGTGGGTGTGTTGTCTTGTATATGGGACCAG
GCTCTGCAGGTTGAAAAAGGATGGGGTACGTCCCTGAGCCCCCAG
CCTAGATCATCAGATGGGAGAGAGGCTGGCTCTGGGTGGTGGGAG
AGAAGGGCATAATAAGAACCCTTCAACGTTGATGCATGGCCCTTG
GGGGCTGGAACCCCTCCAACCTCATGTTGCCCATGTCTCTGCTTG
TTAG

[1069] In some embodiments, the intronic domain that promotes trans-splicing primarily in the heart comprises or consists of sequences from the gene SLCO2B1. In some embodiments, the sequences from gene SLCO2B1 comprise or consist of:

(SEQ ID NO: 1010)
TAAAGATCTTGCTTGGGACCATTGGTGGTGGTGATGGGGTCCAGA
TGCCCACTGTGTGCCAGGCCTGGGGCACAGGCATGAGCGGAATTC
AATCCCTGATCTTAGGGCTCACAAGCTCATGGGGTGACAGACCTG
GCCCAGCTCTCCTAGAGCGGGGTATAGAGGCAGAGTCTAGACAGC
CCGTCAGGAAGCCACCTCGGATGCAGGGGTGGGGCGGGCTTGAGG
GCCAGACAGCCAAGAGGCCCCAGTAACCCAGAGCCCCTGAGGGGT
TGTACATGCCAGGGAGGGGGCAGGGTAGGACGGTGGGCCTTCATT
GTCCCCTGAGCACCACCTCCCTCAGCCTGGATGCCCAGCCCCGTG
ATCCACGGCAGCGCCATCGACACCACCTGTGTGCACTGGGCCCTG
AGCTGTGGGCGTCGAGCTGTCTGTCGCTACTACAATAATGACCTG
CTCCGAAACCGGTGAGACCTGGTTTGATGGCTTGTGGGAAGGGTG
CTGG

[1070] In some embodiments, the intronic domain that promotes trans-splicing primarily in the heart comprises or consists of sequences from the gene PICALM. In some embodiments, the sequences from gene PICALM comprise or consist of:

(SEQ ID NO: 1011)
GTAAGTAAATAAGGAGAGCTTCAATAGTTCCATGGTAGAGAGAGG
CCTGCTGGAAGGTTCAGAAAATAGGCCGTTTGGAACCTTCTCCTT
TAAGCCAGGAGGGCGGCTTTGGGAGGCGTCTTGAAATACATTCTT
GACTCTGCTGGGAAAGCTCGGGGAGCCAGAGGCCTAATACCCCCC
ACTTCAGGGGAAGCTGTGAAGGCAGCTGCACCTCCTTTGTCAAGC
TGTTGGTTTCAACCACAGACACGAGGACACACTTGAGGTGGGGGG
ATAAGGGGAGAAGCCTGCCGCCCCGCCCCACCCCCGCCAGCACAC
CGCCCTCGCCATTCCTCTCCCGCCCCGCCCCGCCCGGCGTCTGTG
ACCCCGCGGGCCGAGCCTCAGGCGACCTGTTGGCAGGGAGAGTCA
CGTGATGCGCCGGCTGTGCACTCCCCTCGGGCGGGCCTCCTGTTG
CGCCCGCCTGGCGAGTTCCATCACGTAACGCGCGGGCGCCGCCCA
GCTC

[1071] In some embodiments, the intronic domain that promotes trans-splicing primarily in the heart comprises or consists of sequences from the gene PICALM. In some embodiments, the sequences from gene PICALM comprise or consist of:

(SEQ ID NO: 1012)
TATTTTGGATTTGGCTGGCAGATGGTGTACACAGACTTTCTGAGA
ATGTTAGCATTTCATTTGAAACTAGCAAGATTACATGTGACTATC
ATGGTAACTTAGCACTCACATATTTTTCAACTTATCCCTAACCCT
GGGTTGAATGTAGAGGCTCTAATAACATATAAAAGGCTTTGTTAA
TGTATGGTCTGGGTCTCATTGAATAGTATTTCAGGATGTAATACT
TCTTTTAAAATGTCCACAGGGCAGTGTCAACGTCTTTCCATGGAA
ATCTGGCTCACCCAATAAGAGAAAAGAGGCCAAAGGTAAGAAAGA
CTAAACCAGGGGAGATGGCAGGCAGTGATGTCTGGACTGTTTGAA
TGGGACTTCTCCATTTACCGCCCCTCTCACTTCCTTCTATGGTCT
GGACCTTTAATCACCACAGCAGTCAGCCATGTAGGGTCAAGCTAA
TCGCTGTTGACATCATCCTACTACTTCCCTTTTCAAATTCCAGTG
AAGC

[1072] In some embodiments, the intronic domain that promotes trans-splicing primarily in the heart comprises or consists of sequences from the gene SLCO1B3. In some embodiments, the sequences from gene SLCO1B3 comprise or consist of:

(SEQ ID NO: 1013)
TTTAGTATGTGACTTGCAAATTTTTCTTGACAGCCAGACAAAATG
TATTGGGTAAAAGGAATTGCTGTATATAAGCCTTTATTAATGTGG
TGTAAGGCGATGAAGACAAAGTAGCATCCTGTAGTTCTATGATAA
GGCCTCAATCTTTTAGTGAGCCTGTACCTCTGGACTGTGAACTTC
AAACTTGCTTCTCAGTTTCTGTCTCCCACTCCTTAGGTAGAATGA
GATGGCTTGAGGGGGCTGGAGTTATGTATTTTCCTCCCTCCCAAA
GGAAGGCTAGAGACAGCTGGGGTTTAGTTTCTGTAGCTTCATATG
TTTTTTTAATAATAGAAAAATATCTTATGCCCCCAATGAAAATAA
TAAATAGAATTGTTCTCTTAATATTTGTATGTGTAACTTGTTTTT
CTTTCTTTTAAGATATGCATACTGGGGAGAAAAAAATGTAAGATA
TTTTACACATTTAAAATAATAATCGACTCTCTATTTTCTCTTTTC
ACAG

[1073] In some embodiments, the intronic domain that promotes trans-splicing primarily in the heart comprises or consists of sequences from the gene SLCO1B3. In some embodiments, the sequences from gene SLCO1B3 comprise or consist of:

(SEQ ID NO: 1014)
ACCCATTGATAAGATGTGTCTTCATTGCATCTGTCTGTTCTCTGG
GAGAAGCAAAATCTGTGTTACTTCCTTGCATACTTGTTTGTTTAT
TCATTGTGCACAAGAAGATATCTTCCACATCTTCACAAGCTGGAT
AAGAAATAGAGAAAATGAGATCAAATATTTAAATATTGCATTTTC
TGGTAGTGATGCAGGATATTTCTTGGCCTCTTCACTGGACTCACA
ATAGAGGTGCCCTGTTTATTTGGTCTGCCATGCTCAACCCCTTGT
GGGAGGGAGAGTGTGAGTGACGTAGTGCAGGACCATGTGGGCTGT
CCTGGTCATCGACACAGAAACAAGCTCTGTGAGTTTCTCATGGCC
AGACCAGGTGCGAGTGAGTGAATGCTGGACCTGGGCAACCGCTCC
AGGCACTGAAACGAGTGAGTTACATGCAGGGCTGGCAGCCAGGCA
AGGTGCAAGGGTGCTCAGGATCCTGAAGCCCCAGAGGGGTTGTTA
TGGT

[1074] In some embodiments, the intronic domain that promotes trans-splicing primarily in the heart comprises or consists of sequences from the gene ANO6. In some embodiments, the sequences from gene ANO6 comprise or consist of:

(SEQ ID NO: 1015)
AATTACTGATGCCTGAGGCCACCTCCAGAGATCTGGTTTAATTAT
TGGAATGCAGCCTCCACTGGGATTTCTAAAAGCTCCCAGAAGATG
TTATTGTGCACCAGGGGTAGTGAACCACAGACCTGAGATGTCAGG
GTCCTGAGAGCTCATCTCATCCAGTGGTTCTCAGCCCTGGCTGCA
GATTAGCATCATCTGGAGAGCTCATGAAAGAAGCACTGAGGTCCC
ACCACCTGAAACGACCTTTCAGAGGAAGGAGCCATTCTTTTTAGA
AGGTGCTCAGGTGATTTTGATGCACAGCAAGAGTTAAGGTTAACT
GACATCTTAGCCATCCCATGTTATAGATAAGGAAAATGAGAGCAA
AAATGGTCAAATGGCTTGTACGAGGTCAGGTCCTTGTTGTTACAG
AGGCAGGTCTGATGCCGCCTCCTGCTCTGTCTGCAGCCTAACACC
ATCCCTTATATTGGCCTGTTGTATTTATTGATGCCTCCTCATCCT
TCAG

[1075] In some embodiments, the intronic domain that promotes trans-splicing primarily in the heart comprises or consists of sequences from the gene ANO6. In some embodiments, the sequences from gene ANO6 comprise or consist of:

(SEQ ID NO: 1016)
TAAGATCCCCTTCCTTTGTATTTGAACAGCATCCTTCCTTCTTTT
TCCCCTCCGACTGTCAGTTCCGGGAGAACAGGCCTGTCTTTCCTG
TTATTTCTGTAACAGTAGTGGGGTTTCAGATAATATTTGTTGAAT
TGAAGTTCTGTAACTTTTTATTCCTCAGTCCACATGGATTGCTGA
AAATAATCCATTCCTATATGCATGCTTCAGAAAAGAACTTCAGAA
AGCAAAAGTTATTTCTCACTGCAACCTCTGCTTCCCAAGTAGCTG
GAATTACAGGTGCATGCCACCACACCCAGCTAATTTTTGTATTTT
TAGTAGAGACAGGGTTTTGCTATGTTGACCTGGCTGGTCTTGAAC
TCCTGACCTCAAGTGATCCACCCACCTCGGCCTCCCAAAGTGTGG
GGATTACAGGTGTGGGCCACCATGCCCGGCTGCAAA

[1076] In some embodiments, the intronic domain that promotes trans-splicing primarily in the heart comprises or consists of sequences from the gene KRT8. In some embodiments, the sequences from gene KRT8 comprise or consist of:

(SEQ ID NO: 1017)
GTGGGTGTGGGTACCTCTGACCGGACCTGCTTCCCTATCCCTGGG
ACCTGGGGTGGGGACGGTGGGAGCCCCCTGAAGCCCCTTGGGACT
TGGGGTCCTGTTGTTCTGGGCCAAGAAGGGCTAGGAGTTGGTCCT
GACACCCCATTTGTCTGGGTACAGGCTGGAGTCTGGGATGCAGAA
CATGAGTATTCATACGAAGACCACCAGCGGCTATGCAGGTGGGTG
TCCCAGGGCCCTGGGATGAGGGCGGGAGGCAGGGCCCAGGGAGGC
CTCAGCTCCAGGGAGGGGGCTGTGCTCAGTCGCTCACAGTGACCT
CAGCCTGAGCACTCATGTTCTTGGGAGAATCCTAGGGTGGGGAGG
CACATATTCAGGACCCCAGTAATAACTTTATTACTTAGTAACTTT
ACTATTAGAAAGCACCCAAATAAACCATAGCTGTGTGCCAGGCAC
TGTGCTAAGTATCCTACAGGTTTTATGTGATTTATTTTATTTATT
AATT

[1077] In some embodiments, the intronic domain that promotes trans-splicing primarily in the heart comprises or consists of sequences from the gene KRT8. In some embodiments, the sequences from gene KRT8 comprise or consist of:

(SEQ ID NO: 1018)
AAGGGTGTGGAGGGGAAGCACCTGGAAACTGCTCATGTCTCCCTG
ATCTGCTTCCTTAGTCTCGTTTATTTATTTATTTATTTTTGAGAC
AGAGTCTTGCTCTGTCGCCCAGGCTGGAGTGCAGTGGCGTGATCT
CGGCTCACTGCAAGCTCCGCCTCCTGGGTTCACACTATTCTCCTG
ACTCAGCCTCCTGAGTAGCTGGGACTACAGGCGCCCGCCACCAGG
CTGGCTAATTTTTTTTGTATTTTTACTAGAGACGGGGTTTCACTG
TGTTAGCCAGGATGGCCTCGATCTCCTGACCTTGTGATCTGCCCG
CCTCGGCCTCCCAAAGTGCTGGGATTACAGGCATGAGCCACTGTG
CCCGGCCCTTAGTCTCATTTAATTTGAGCTGGGGGGAGTCAGCCT
AGGTGGTGGTGGGGAGGACCCTGAGGGAGGGTGGGAGCACGGGAG
AAGAGAAGGCATACCCAACCTGACCTACTTACCTGTCCCCTACCC
CACA

[1078] In some embodiments, the intronic domain that promotes trans-splicing primarily in the heart comprises or consists of sequences from the gene CSAD. In some embodiments, the sequences from gene CSAD comprise or consist of:

(SEQ ID NO: 1019)
GTGCATACAGTCCCCTTCTTCCCAAATCCCGCCCTTCAAACCATT
GGTCCAGAGAATCATCATGGACTAGGGAGTTTAACATGGCTGGGG
TAGGAGGCTGAGGGGAGGGGGACTGGAGAGAGGATTGATTGGAGC
TGGGAGGTCAGACATGGCAGTTCTTCCTGATGCTGGGGTGAGGGT
GAGACCAAAGCCCCTTTGCTGGGGACCTGGAAAAGGAGGAAGGGC
TCTGGTTGGGCAGCTGGAGGAGGAGCCACTGACCTGCCTTTGCTC
CACCCCATCCAGGGCTGACTCTGTGGCCTGGAATCCCCACAAGCT
CCTCGCAGCAGGCCTGCAATGCTCTGCACTTCTTCTCCAGGATAC
CTCGGTGGGTCTGCCCCTGCCCCTGCACCAGCCCCACCTCTCTCT
GGAGCTCTGCCTTCTCTATCCCACCTTAGATAAAGTTCAGGCCTT
TCTCTATTCTCTTTACCATCCCTTCTGAAGCTGCATCTCAGCTAC
CACC

[1079] In some embodiments, the intronic domain that promotes trans-splicing primarily in the heart comprises or consists of sequences from the gene CSAD. In some embodiments, the sequences from gene CSAD comprise or consist of:

(SEQ ID NO: 1020)
CACTATGCCTGACTCAATTTTTTTTCAATAGCATTGGATCTTCCA
GTAAAACATTCAAGTTCTTTGAGAGTATGAGCTTTGGAAATGAAA
ACCTAGGTTCGAAGTCCATCTCTGCAGCTTCTGCTTGGATCTTTG
AATCTCAGTGTCCCTGGCTGCACATTAAAAAGGACAGTAACACAT
TGTTGTGAGGTTGAAATGGGCCATTTTAGGCATGCAAAGAGCTTA
GAGCTGGGCCCAGCATCAGGCTCTGAGTAGCTTTTGAGATGACTT
TACATCTTTCTCCCTCTACATTTTGGCAACAGGGTGCTGTGCCGT
TCCTGGTCAGTGCCACCTCTGGCACCACTGTGCTAGGGGCCTTTG
ACCCCCTGGAGGCAATTGCTGATGTGTGCCAGCGTCATGGGCTAT
GGCTGCATGTGGATGTGAGTGGGACTTCGGCTTGGGGGTGCGGTG
GGGTGGGCTGAGCCAAGGCCAAGGCCCACGTTGTTCCTCCTGCTC
CACA

[1080] In some embodiments, the intronic domain that promotes trans-splicing primarily in the heart comprises or consists of sequences from the gene RDH16. In some embodiments, the sequences from gene RDH16 comprise or consist of:

(SEQ ID NO: 1021)
GTAACCACCCAGGTTTGTCAAGTCTGTCTGTGTCTTCCCTCTGTG
TGAAGGGACCACCTCCTGTCTGCTCCCTGGGAAGATTCCTACAGT
GTCTTTCCAGGTTGAAGTAACAGTAGCTTTCTAATATTTCTCACT
TAACAGGCTGCCTGAACCCCATCTCTTTTCAATCCTTAACCTCTC
CCGACATTGGAGGTGTCTAGTCTTGGGGAGAGTTTGCCCTGATGA
GATTTTCTCTCCAGAATTCCTCTCTATCCTCTCCCTCCTGTCTAA
GCAGAAGTCATGTGTTGTTTGATGCTAAGAGCCTGGGTTAGAGAT
CTGGAGACTTGCTGGAGCATCGTTGAGAAGGGAGCACAGGGCTGC
AAGTGTGCACGGAGGCTGTGCCTGTGCTGGAGCCAGGCTTATGTT
CCCAGCACTTTACCTTGTTTTTGCTAGGGCCCATCAGCGTCCACT
GAGAGCTACGATCATCTCCATCTTCAGAGGAGAGTATCAGCTTAA
GGAC

[1081] In some embodiments, the intronic domain that promotes trans-splicing primarily in the heart comprises or consists of sequences from the gene RDH16. In some embodiments, the sequences from gene RDH16 comprise or consist of:

(SEQ ID NO: 1022)
TTCTCATCCTAGACAGCCTGACCGTGCCCTAGTTTTCAGAGGAGT
GATTGATTCTGGGGTGCGGAGCAGGATGAGGAAACTCAGGCTCAG
AGAGGGATTTCCACCTAATGTGCCTGGAAACCATGGGTAGCTACC
CAATAAGGCCTTTCTATGTTCAGAAGGTCATGGACCAGGAGTGTT
GGTATCGGAGCTTTGTAGAGACAGTTTTGACCCCTGTACTTAGAG
CAGAGGGGTGTGTTTGCCATGGAGAGTGTGTGTGGGCAGCTGTGT
GTAAGCCTGTGTGAGTTCTGTGTATGTTCCTGTGTGAATATATGT
GTGTGCTCCTTCATGGACACAGCATGCATGTAGTGGGCATAGCAA
GGCAGAGAGAAATCAGGAGACTAGGGGCACATTGCCCAGTAGGAA
GATAGTATCTTCCTACTGGGCAGGACTTGAGGTGTGCAAAGGTGT
GCATGAGTACTGCAAAAGCAGTTCAAAGAGCAGAGAGGTGGGGCC
AGAA

[1082] In some embodiments, the intronic domain that promotes trans-splicing primarily in the heart comprises or consists of sequences from the gene MON2. In some embodiments, the sequences from gene MON2 comprise or consist of:

(SEQ ID NO: 1023)
AAGCAGTCTACCTTACTTTTTTTTTTTTACTATATTGTTCTGAAG
TCAGGTTATTGCAAGAATAATCCATATTTCATATATTTTTAATGT
AGAAGATAATTGACTTATTTGGGGACAGGTGGAAAAGGGCTTTAT
CATCTATTCGTACTGATTTACTTTGCAGATACAAACTGTATAAAT
AACTTTGAATCATTTTTACCATTCTTTCTCATTTGTTTGCCCTTT
CTGTTGTTCATTCCTGTCCAGTCCATTCTTTACATGATAGCCGGA
AATGATTTTTCCATAGTAGGGCTTTGATCATTTATTTCCTCATCC
TCCCAAAGCAAAAAAATATTTTTCATTTACCGTTTCCTACCAAAT
TGCAAAGAATACTCCAGTCTGACTCCATTCTAGTCACACTTTATT
TCCCACAATAGATTTCATTTCCCCTACTCTGCACTAAACTAAAAT
TCTCAATCTTCCCAAATTTTTTCAACCTTTTGTTTATTTCATTAT
CCAG

[1083] In some embodiments, the intronic domain that promotes trans-splicing primarily in the heart comprises or consists of sequences from the gene MON2. In some embodiments, the sequences from gene MON2 comprise or consist of:

(SEQ ID NO: 1024)
TAAATAATTTTTCTTTTCATTGAATGCAAAGCTTTTTTATGTGTA
CTTGTCTCGAAGCACTCTATTTGTATTACAATTATGCATGTACAT
GACTCATCTCCCTTTACATTGTTAAGATTTTTGAGGGGCTTTTCA
GACCATGTTTTGTTCTATTTTGAATCCTCTACAACATTGCTTTTC
AAAGTATGGTTTGTTGGACCAGCCATTGATTGGCTTCAACAGTTT
TGTTACTGGTCTGGGACAAGATAGTGAGCTGGCATCAGAATATAA
ATCAGATGTGTCACTAAACACACTGCTTGGTTCAGCTGACTTTTT
TTTATACAAGAAGACATTGGTAAAGAAGAAAACTGTGTGTTGGTT
TACATTCTGGCACAAGCTTCTTATTTTGTAGCAGATTGGCACCTT
AAGGAGCATTACTTTTAATATCCAAGAAAAAAGTAGATTCCTAGT
AAATTACTAATGAATGAGTTGTAGGATATTTGTTCCTGTCAACTA
TTAT

[1084] In some embodiments, the intronic domain that promotes trans-splicing primarily in the heart comprises or consists of sequences from the gene BTG1. In some embodiments, the sequences from gene BTG1 comprise or consist of:

(SEQ ID NO: 1025)
CTTCTGACTGTTATTTATGAGCCTTTTCATGGTATTTATCATTTT
AGTATTGAAGATGCAGTGTTCTTTTGGGAATTACGTATGCTTAGA
AGAGAGTACTGATGCTCAAAGGTGAAATGATTTGAATCTAGAGTT
GGATAAAAAGGGAAAGGATGGGGAAAATGAAAACTGGGAAGCTAA
ACTGAGAAGGAATTGCAAGGTTTGGTGATAAAAATTCATTTGCTA
TGGTCATAGTTGTGTATCGAGAGGTTTGCACAGCACAGTCTCTTG
GCAGAGTTTAGGAATCTCTACTCTGGGGATTCTGCAGTTCATGAA
TCGTCAGGGAGACTCTGCATTCAATTTGTTTCTGTGAACATGCAG
GTGAAAGTGGTAGTACAGGTGGAACTTCATGGGAACTGGTTTTGG
GGGAGGTGTGGATGGAAAGCACAAATGTCTCAGTATTTTCTAAAG
GGAGACTATTTTTAAAGGTGTCTTGTTACAAACCACTTGATTATA
GCCT

[1085] In some embodiments, the intronic domain that promotes trans-splicing primarily in the heart comprises or consists of sequences from the gene BTG1. In some embodiments, the sequences from gene BTG1 comprise or consist of:

(SEQ ID NO: 1026)
CACACCATTCTCGAGAGTTAGAATTCGTAGACCCGCAACACATGG
ACTACCCTTGCCAATTGTTATGGTTTTATTTTTAAACCTATTCTG
TGAAAAAGCTCCTCGGTATTTCAAACTTGAATTACAATAAAAACA
CCAGGTAGGGTTGTTTTTAAATGGGTCTCACCCCAGTGCTGACTA
CTGTTGTTTACCAACTACATTTCATCTGGTAACTCCATTGAAACT
AAGTACCTCAACCATTTTTTTTTTTTATCATAAAGCCTTTTTTCA
AATGGAAAGTTGTTTTTGAAGATCTTGACATCAGACTTTTTCAAT
CTTTGAAAATGATGGAAACAGTTAATAAAAATGTTTATTTTAGAA
TTCAGGTGATGTCTGGCTTGTGAGGAGCTGTTTATAAGTTTGTCT
TTGAAAAAGGCTTGCACACATCACTCTGAGACCAGCTGTTTCCTG
TGACTTTAACCTTACCTTCCCCAGACAATTGAGCTGAACCTGTAT
CTGC

[1086] In some embodiments, the intronic domain that promotes trans-splicing primarily in the heart comprises or consists of sequences from the gene HAL. In some embodiments, the sequences from gene HAL comprise or consist of:

(SEQ ID NO: 1027)
TTATGGTGTCGCTTTATTCTTAGGTATTTATAGCAAAGTTAAGCG
CCTCTAACAGCAGTTAATCAAGCTTCTGAAGGATTCAGTTGACAG
ATGTCAACCGTTTTAAGAACAATATGCTTGACTCAGTACACTCTT
TTTCCCATTGGCTAGCAACAAAAGAGTTGGAGGTATCAGGATTTC
CTCCCCAGCCCCGCAGGCTCACCTGGTCTTTGTCACAAGTTGTCT
CAGGGCAGCTGGAGGAGGCAAACCCTAAAGAACAAGGGCTTTTCA
AGTCCCTGTTGTGCCACGTTCGCTAATGTCCTGTTGGCTAAAGCG
AGTCACGTTCCAGGCCCAGAGTCAATTTGGGAGGGTAACACTCAA
GGGCATGGGCATGTGATTTGACGTGATCCATGGGCCTGTATCTGA
CAATCTACCACATGCATAAAATCCCATCACAGGCTGGGTGCAGTG
GCTCATGCCTGTAATCCCAGCACTTTGGGAGGCCAAGGTGAGTGG
ATCA

[1087] In some embodiments, the intronic domain that promotes trans-splicing primarily in the heart comprises or consists of sequences from the gene HAL. In some embodiments, the sequences from gene HAL comprise or consist of:

(SEQ ID NO: 1028)
AGCTACTCAGGAGGCTGAGGCACAAGAATTGCTTGAACCTGGAAG
GTGGAGGTTGCAGTGAGCTGAGATCATGCTACTGCACTCCAGCCT
GGGCGACAGAGTGAGACTCTGTCTCACAAAAAAAGAAAAAAAACA
AAAAAACAAGAAAAAAACCACATAGGTACTGTTAAGACCCTGGAG
CAACTATCCTTCACTCTATCCACACTGAATTCTCTGGGTTTTGTT
ATTTGCTTGCTTGTTTTGCTTAGGAAAAGTATGCAGCTTAAAATC
TTTATGATGACTTTAGAAAGTTTTGGACTTTGTATATTTACAGTC
TTTAATGCAACCAAAGACTAATTGACACAGGTCATGTGTCAAATG
GCTTAAAATAAAAGCAAGCAAACAGCAGCTGTGTCTGGTCATGTA
TAGAGTATGTTTTGACTTCGGATGAAGTTGATGTTTAATAGCATG
TGGAAACAATGTCGTCAATATTTCAACTTTGTTTTGTCCTTGCTT
TTCA

[1088] In some embodiments, the intronic domain that promotes trans-splicing primarily in the heart comprises or consists of sequences from the gene NR1H4. In some embodiments, the sequences from gene NR1H4 comprise or consist of:

(SEQ ID NO: 1029)
ATTTGGGTGTCGAATGATGCCATGCTCATGATTTGTAGAGCATAA
TAACAATGTTAGCCTTAGGCCATTTTTATACATTATCTTGAGGCA
GAAGCTAGTTGTTACTTTGCTTTACCATAAAAATTATGACTTGTG
ACTAAAAAACTATTCAGCAGAACCTTCTAAAGTTATGTATGGATA
TGTCCTATGACCCAGTGATTTCACTTCTGAGAATATACTCAACAG
AAAGGATGCTCACGTCCACCCTACAGGTTATCTTTAGGGGTTTTG
ATTGGAAGGGGAATTGGGAGGCTTCTGGGAAGCATTACATGTGTT
GTATCTTGATCTCGTTATAATTACGTGTGTGTGCATAAAAATTCA
TCAGGTTGAACACTTAATTTTCACATTTTGTGTACAACATTTAAC
TTACACTTCAAAATAGTTAACGTTGCTATAATTATGCTGAATTAA
TGCTTTTCCACTTTTTAATTTTGTCATTTTATTTTAAACTTCAAA
ACAG

[1089] In some embodiments, the intronic domain that promotes trans-splicing primarily in the heart comprises or consists of sequences from the gene NR1H4. In some embodiments, the sequences from gene NR1H4 comprise or consist of:

(SEQ ID NO: 1030)
TTTCTTTGGGAACAAAATTTGATAAATATACAAACTCATTTCTTT
AAATGTTGAAAGACATCCTATTGAATCTGAGGGGGTAATTTACAG
AAAGATACTGTCTCTCGCACTTTTGTCATCTCTGGAAAAGTCCTG
GTGAATAGTCATTCATTTGTAATAGCCCTCTGATCATTTCCTTTT
CTTTGAAGTTCAAAGAGAATAGCAAACAGAAAAGTTAACAATTTT
CACATAAAATATTCCCTCAAGCAATCCTTTCCCCCATAGTTAGTC
TTGAGGCAGGATTCACAAATTCAGAGTATGCAGCTAACTGCAGTG
ATGGGACCTTCGCTTTCCTCTCTTAAAAGTGAGGAAATGATTGGC
TTCATTGTATCCAATCATCTTTCTGTTTTGTTTTGCTTTTGAAAA
CATTCCTACAGCTGGGAGCACAGCTGCTGTATACTTCCCCCAAAG
CAGGAATTAGTTCATTTCCTTCCTTCATTGTTACACTGTTGCATT
CTTC

[1090] In some embodiments, the intronic domain that promotes trans-splicing primarily in the heart comprises or consists of sequences from the gene IGF1. In some embodiments, the sequences from gene IGF1 comprise or consist of:

(SEQ ID NO: 1031)
ACCTTTTAGAGAATCTCGCTAAGAAACATGGAGAAAACGGAAAAG
AAAAATGTAATGCCCTAGAAAGCGCAAAGAAAGACAGTGGCAAAA
ATGAAAAAAAAAAATAAAAATTATAAAAGAGGCAAAAAAAGACAC
ACTATTCTCTGCCTCTAAAACACAATTAAATAAAAGAATTTAAAT
AAAAATTAAGGCTTCTATATGCATTTTTAAATTTTGTATGAATCT
GTTATGGAAGAATTGCCTATGTCAATATATGTTCAGAGTTAAATA
TTAGCCCCAAATGCTCAGCAAGACTGAATTGTGTCATAGAAGTTC
CCAGATTCCCTTTTCCCGCAATGTCATTGGAGGCTGCATTTCTTA
GTCAAGTCCAGGGTTTAGGCCAAAGGGCATCCGGTATTGCCTAAA
ACCCTGTGAGGTCTGTGAGGTAACTTTTGAGAAGAGGTCACTGCA
CTCTTCATCTTTTTTGCACTTTGGAATCAGATATAAAAGATGTAT
AAGT

[1091] In some embodiments, the intronic domain that promotes trans-splicing primarily in the heart comprises or consists of sequences from the gene IGF1. In some embodiments, the sequences from gene IGF1 comprise or consist of:

(SEQ ID NO: 1032)
TGGTCTTAAACCTCAGCTGAGGCTGGAAGAGGACCATGGTGGCTT
ATTGGAGATGTGACCCCAGGGAGCCCCTCTGAAGGATGGAAGGGG
ACTGGGCAAGACCCAACACACACAGAACACAGTAGCCACTGGCCA
GGCAGGAAGCAAGGATCTCAGAAAAGACTTTTAGGTGAATGTGGC
AGGAAAGCGTGCTTGCTGGGGCAAAGGCAGATTCATTCTTTCTCT
TCCCAGGTGACCCAGCGCCTCTTGGTTTCTAACTGGGGAGGGGGT
AGGTGTCAAGAGATGAGTCCCAAAGTTCTGGAATGGTGGGTCTTG
TGACTGAGGTCTAGACCCCTCTCCAGCATGAGTGCTGTCTCCTGC
ATCATATGGAGCCTGGGCATTCTGAGCTCATTCAAAGGGACACCA
TGGGAACCACTTGTTCTCAATGCAATTATTTTTGTGATGTTTACA
GTATCAGCCCCCATCTACCAACAAGAACACGAAGTCTCAGAGAAG
GAAA

[1092] In some embodiments, the intronic domain that promotes trans-splicing primarily in the heart comprises or consists of sequences from the gene HPD. In some embodiments, the sequences from gene HPD comprise or consist of:

(SEQ ID NO: 1033)
TACTGTGTCTGTGTTTGTGTTGCGCATAAGGCAGTAGTGCCTTAT
GGCAGCCAGGGGGAGGCCAGGGCGGCCGCCAGCGCCGCGGGACCG
AGGAGCTGCGGGTGCCAGCGCTTTGCCAGCGGGACCACGCGGAGA
GGGGAATTCTGGAACCAGGGAAGGAAGGGGACTTGCTCTGGAGGG
AAAGACGGATGACACTGCTTTTGTAGAGAGATAAACGCGATTCAG
ACAATAAAGCAAGCGATGAGCCGGGCGTGGTGGCTCACACCTGTA
ATTTCAGCGCTTTGGGAGGCAGAGGTGGGAGGATCGCTTGAGGCC
AGGAGTTCGAGCCCAGCCCGGTAACATAGCAAGACCCCGACCCCC
CTGCGTCTACACAAATAACAAATAAAAATTAGCCTGGCGTAGTGG
CGCACACCTGTGGTCCCAGCTACTCAGGAGGCTGAGGTGGGAGGA
TCGATTGATGGACAGAGGTCTAAGCTGCAGCGAGCCCTGATCCTG
ACAC

[1093] In some embodiments, the intronic domain that promotes trans-splicing primarily in the heart comprises or consists of sequences from the gene HPD. In some embodiments, the sequences from gene HPD comprise or consist of:

(SEQ ID NO: 1034)
ACAGCGCAAGGCTCCGTCTCAAAAAAGAAAAAGAAAGTGTCCTGA
TAATGTCTGCGGGGAGGATGGATTGTAAGGATACAAGATTAGAAG
CGGGCAGCAGTCTTGAATGGTGCCTTAGGAACTGTAGTAGGGGGA
TAGTAATAGGACAGTTTGGGGATATATTTGGAGGTGGCTGAACTG
CCAGAAAAAGAGGTCATTTCCAGACTTTTGGGGTGCAGGAGCCCC
TGTGGACTTTCCAAGGATCTCACCGTGCCAGCCTCCCCTAGCAGA
GCCCCCTGTCTCCCGCCTAGGAGCTGAAAATCCTGGTGGACTACG
ACGAGAAAGGCTACCTCCTGCAGATCTTCACCAAACCGGTGCAGG
ACCGGCCCACGCTCTTCCTGGAAGTCATCCAGCGCCACAACCACC
AGGTACTGCTTGTCCCCGGCAGGCCCGAGGGGACAGGCAGCTAGC
ACACTCGGTTTTCTGGGTCCTTGGCTCATCTCCTCTCTTTCCCGC
CACA

[1094] In some embodiments, the intronic domain that promotes trans-splicing primarily in the heart comprises or consists of sequences from the gene PHF11. In some embodiments, the sequences from gene PHF11 comprise or consist of:

(SEQ ID NO: 1035)
CTTCTCCAGTCGTTCCAGTCCTCCCCGGCCCTCTACTTGAGTGGG
TGGGTCTTCTGATGGGTTCCTGCCCTTGCGTGTGTGTATAGCTCC
AAACGGTGTGCCAGGCTCAGGGCAAGGTCCTGAGCATACAAAGAT
GAGTTAGGCAGACCCTGCCCTAGAGACTCTACTAGGCAACTTTAA
TGAGGAGGTCAGAACCACAGAGGTACAGATGAGAGACTCCTGACT
CCCAGTCTTCAGGGAAAGCTTTTTGAGGAGAGGATGGCTGGGCTT
ACCCTTTTTTTTTTTTTTTTTTTTTGAGAGGAGTTTCACTCTTGT
TGCCCAGGCTGGAGTGCAAAGGCGCTATCTCGGCCCACTGCAACC
TCTGCCTCCCGGGTTCAAGCGATTCTCCTGCCTCAGCCTCCCGAG
TGGATGGGATTACAGGCATGTGCCACCACGCCCAGCTAATTTTGT
ATTTTTAGTAGAGAGGGTTTCTCCATGTTTCATGGGCTTACCTTT
AAAG

[1095] In some embodiments, the intronic domain that promotes trans-splicing primarily in the heart comprises or consists of sequences from the gene PHF11. In some embodiments, the sequences from gene PHF11 comprise or consist of:

(SEQ ID NO: 1036)
TAAGTCACGGGAGATGCGCTTCCATCCTGACCTCTTCCTCAAACT
CCAGACTGGTATAACCAACTTCTTCCATTTCTGAAATGATCTCAA
ACTGAGTATGTCCCAAAGAGAATTCTTGTTTCCTCCACTGTATTC
AGGTACTCCAAACCTGCTCAACCACCAGCCCATTCCATTCGCCCA
GGTGCTCCTTGCAAAAACCTTAGTGGCTCCTCAGGGCCTCTCTTT
CCTCCGGACACCCCTTCTAATGCATCAGTCGGGCCAGCCAGTTCT
GTGTTCAGCCTGACTGTATCTGGAGCCTGACTGCTTCTCACCACT
TCCATTACTGCCACCCAAGCCTACGCCATCATGATCTTCTGTCTG
GACTATTGCTTTCCTGGCTTCTATTCTAGCCTTTAATACAGGCAG
GCCTGCAGAGCGGCCAAAATGCTTTTTGAAAAACAAAAAGCAAAT
GTGATTCTCCTACTCAAAACCCACCAATAGTCTCCCATGACTCTC
AGAA

[1096] In some embodiments, the intronic domain that promotes trans-splicing primarily in the heart comprises or consists of sequences from the gene CCNB1IP1. In some embodiments, the sequences from gene CCNB1IP1 comprise or consist of:

(SEQ ID NO: 1037)
TTAAGTATCATTTGTTACTATTATTTTCTCTACTGAGCGTGGAAA
GCTGGCTGAAAATTCCAGAGTGTAATTTCTGTGGGTCTGTTTCTC
TAAAACTTGCCCCTCACGCAGCTTGTACAGAAGTTAGATTGGCGC
TTACTCCCAGCTGGTGGAAGATTCGGAATTAGCTGCGCCTCTGCT
GCGTGAGAGAGGGCTCAGCTTTAAAGCTTCCCAGCTCCTCTGCTT
TCCCGCTGCCCCCTACTCTGCCGGATGTAAAATAGGCCTCTTAAT
CTTAACTGTGGCTGCCAGGTGACATACCTGAGGAAACTCACTCAG
CGGGGCTATTGGGATAAAGGTGTGCGAGTGTTCTTTTCTATCGAC
CTGGAGGGCCAAGGCAACTTTTTTTTTTTTCCTTCTGGGACGGAG
TCCGTCGCCGGCTGGAGTGCAATGGCGCGATCCCGGCTCACTGCA
AGCTCCGCCTCCCGGGTTCAAACGAGTCTCCTGCCTCAGCCTCCT
GAGT

[1097] In some embodiments, the intronic domain that promotes trans-splicing primarily in the heart comprises or consists of sequences from the gene CCNB1IP1. In some embodiments, the sequences from gene CCNB1IP1 comprise or consist of:

(SEQ ID NO: 1038)
AAAGACGGAGGGTCGCTCTTGTTGCCGTGGCTGGAGTGCAATGGT
GCGATCTCGGCTCACTGCAACCTTTGCCTCGTGGGTTCAAGTGAT
TCTCCTGCCTCAGCCTCCCGAGTAGCTGGGATTGCAGGCGTCCAC
CACCACGCCCAGCTAATTTTTGTATTTTAGTAGAGAGAGGGTTTC
ACCGTGTTGGCCACGCTGGTCGGGAACTCCTGACCTCAGGTGATT
TGCCCGCCTCAGCCTCCCAAAGTGTTGGGATTACAGGCGTGAGCC
ACCGCGCCCGGCCCACTATCGCTTAATTTAAAGAGCTGTAATGCA
TGTTTGTAATGCAGACTCAAGGAAAATTATAATTTCCTTAAATGT
GTATAGAGGATGTGTGAGAGTGGAAAGATGTCTATTCCAAGGTGG
ATAAAAAATAAAATGGTGGACTACCTCAACATGGAGGTGCCAGCT
GTCCAATTACAGCTGTCACTCTGTTTCTGGGAATTTCTCCCGATT
CTTA

[1098] In some embodiments, the intronic domain that promotes trans-splicing primarily in the heart comprises or consists of sequences from the gene PSMB5. In some embodiments, the sequences from gene PSMB5 comprise or consist of:

(SEQ ID NO: 1039)
AGGACTACTTGCATGACCAAAGCCAAGATGGCAGGTACGTCCTTT
TAGAATTTAAGGTTAGTGAAGCCATCTATTTCCCCGACCCCCTTC
AGTGAAAATGGTCTTTCGCATCTGGCCCTTCTTTTTGGAGGCGTG
CTTGCCAGCAGTCAAAATGGCTCCATTCCGGAATAGATTTAATAG
GAAGTGAAGCTGTGACGGCGAGGCGTTGCCCGGCCTATCTTTGCT
AGGCGTTCTCAGAATTAGTTCTTTCTGCCCACACTAGACATGGCG
CTTGCCAGCGTGTTGGAGAGACCGCTACCGGTGAACCAGCGCGGG
TTTTTCGGACTTGGGGGTCGTGCAGATCTGCTGGATCTAGGTCCA
GGGAGTCTCAGTGATGGTCTGAGCCTGGCCGCGCCAGGCTGGGGT
GTCCCAGAAGAGCCAGGAATCGAAATGCTTCATGGAACAACCACC
CTGGCCTTCAAGGTGTGGAGCCAGCCCCCTTGCCAGGCTGAGTAC
TGAA

[1099] In some embodiments, the intronic domain that promotes trans-splicing primarily in the heart comprises or consists of sequences from the gene PSMB5. In some embodiments, the sequences from gene PSMB5 comprise or consist of:

(SEQ ID NO: 1040)
TCTCAACCGTCCTCCCGTCTCTGAGATGGTAAATTACTACTGACA
CTTATTCAGGTCTGAACTGAGAATCTAGTTTGTGGATTAACTGGA
CCCTTTGCTTTTTCTTCTTCCATCTGCCTTTTAGGCAATTCATTA
CTTATTCGAATTTCCACCAGAAGGTAGGAGTCAAGAGAACGAATA
TTGGATATTAATAACCGGTTACTGTTAAAGAAGGGTTGCTGTATG
GCGACTGACAACAAGAGGTATAGCACTTTTATTTTGTTGCGTTGT
TTTACCACTAATTGCTGTGGTTTAACTAATATAGGGAAATGGCCT
CAGAATGGATCATTATTTTACCCAATTTTAGAAGGTGCCCTTAAA
CAAGATGGCAACCTCAGGCGCGTTAACAAGGTGCTGAAGCAGCAG
CGATGTAACCTGTTGCTTGGACACCAGGCTGGAGTGGGAGGACTC
ACCGCTAAGGGTTCAGAACCGATTTTCAACCAGTCACGCCCTTCT
CAAA

[1100] In some embodiments, the intronic domain that promotes trans-splicing primarily in the heart comprises or consists of sequences from the gene CTAGE5. In some embodiments, the sequences from gene CTAGE5 comprise or consist of:

(SEQ ID NO: 1041)
AAGTCCGGACGTGGTTGGCAGGGCGCACCGGCGCGTGCCCCGCAG
GCCATTTTTCTGACTGGAATGACGGCGGCGGCTGGCTTCTCGGGG
CTGCCGGGGTCTCCCGGGGTACGCCGCCGTCAGGACTTCTGCAGG
GCGCAGACAGCAGGCTCCAGCGAGGCTGCGGAAGGAAAGCCTTGG
GTGTCGGGGCTGGGCCTGGCGTCGGCCCCTGGGTCGGGGGGGTGG
GGGTTGCGCCGAGACGCCTCTAGGAGAAGTCTCGCCGCCGCCGCC
ACCGCGGCCGCCCGAGGCGGGTGCCCTTGGGACATAGCCCTGGTC
TTTGGGGTTGTGCGGCTCACACGACAGCGCGGAGTATGAGGCCGA
ATCTCATCCTCTAGTCCCAAGCCTCTCCACTACCAGGGCTGGGTG
GCTTCGCCAGGTAGAGCGCCGGCCCCTTTAAGAGCAAACGACCCG
GACACGTCTGCGAAGCTTGCGCGAAGAAGGGGAAGTTTGCGGCTG
TCCG

[1101] In some embodiments, the intronic domain that promotes trans-splicing primarily in the heart comprises or consists of sequences from the gene CTAGE5. In some embodiments, the sequences from gene CTAGE5 comprise or consist of:

(SEQ ID NO: 1042)
TGAGCCCAGGCGCGATGAGTGTTACGTGGCCCAGGGGTCGCGGGA
GCCGCCGGGGGAAGGAAGCAGTAGACCGGCTTTGGGGTCTAAGCC
GCCGTGGTCAGAGGTCCCGAAGCCAGTCCTCGTCTGCTGCCCGGC
TCCCGCCCGTGTTCGAGGCAGTAGTTAGGCTCGTAGGGCGCTTGA
GTGGTTTTTGTGTGATGGAGGAGGACCTGGGGCTCTGGGAAGGTG
AAGAAAGCACTTGCTTAGCTGGACTTTGCAAAGATGTAAATGTTT
CCCGATTCCTAAAACTAATTAGCCTTTCCGCTATGTTGTTTATTT
TGAGCAGAGACACGTGGTTCCTTCGACTGTGAGAAACTTGAGGAC
TGTTCCTTTAAATTAGTTACATTTACTGATGTAACTTCTCGTTGA
ACCTTGAAAGAACACCTGAGGTTGGGCGGGGAGTTGAAATTTTGA
TTCTGCATTTTTTTTTTTTTTGGTAAAGAATGAATGCCCTTTTGA
GATG

[1102] In some embodiments, the intronic domain that promotes trans-splicing primarily in the heart comprises or consists of sequences from the gene SERPINA10. In some embodiments, the sequences from gene SERPINA10 comprise or consist of:

(SEQ ID NO: 1043)
GTACTTTGATAATGTTCTGCTCTCCCAAGGCCACAGGGCCCTACG
ATTGTCTCTCCCTTTCCTTTCGTTAGGCCAGCATATGATTAACGC
TACGTGATTTTCTATGAATGTGTTTTCACGTTTCAAAAACAGATT
GATACACATATTGAACAGTGCCAGACGCTGTCATTTGAGGCCCTT
CCCTGGTATCCTATGTGCTTGTAGTCCTTATTATTTTCAGAGCAC
TCTACATAGCTCCCCTCTGACACTTAGAAGCATAGGGTCTTTCCA
AAAAACAGGGGGCTGGGGGATTATCTGGGGGATTTAGGATTGCAT
CATTGCTCCTTCATTTTTACTTTTTGACCAACTCTCTGCCCTTAG
ATTCCTATTATAGAAAATAGGGACACTCCACCTACTACAGTGTTA
GAGGCTAAATGAGACAATGAATGTAAAGTGCCCAGATGGGCTTGG
CACATAGCAGACACTGAGTATCTATTGTTTACTTGTTCTTCCAAA
CTGC

[1103] In some embodiments, the intronic domain that promotes trans-splicing primarily in the heart comprises or consists of sequences from the gene SERPINA10. In some embodiments, the sequences from gene SERPINA10 comprise or consist of:

(SEQ ID NO: 1044)
TCCCCCTTCCTTGCCTAACGGGCATGCAGGCACTCCAATCCCCAG
CCAAACAGGGCACTGGGCAAGGCCGGCCACCCATCTGGATGGGCA
GCCTGACGACCAGATGGTCAGGGCAGTGAATGAAGCAGATCAAGG
AAAGGTGTGTGAGGACCCCTGATTCCACCTGCTTGGACCCCCACC
TTCTGTGCTGCCTCCTGCTCCCAGAGTGGACTCTCTTGCCCTGGC
CCTCAGGGAGGAGACGGGATGAATGAAAACGGGGTCAGGACTGAG
AGCTGCCTGCCGGCCTGGCAGGGAATGGGAACTGGAGGAGGTTTT
GCTCTGTGAAATAATGTCCCCTCTTTGGGTGAGCAAATGTCACCC
ACACTTGCTCTAGGTCTCCCTGGGGCAGGGCTAACCTACTTGAGC
CACAGGAAGGAGGCAGGGTCCCTGAAGAAGCTTTTACTATCCACA
AAGACATTTTAGGAGGCATTAAAACCATCTCTATCCTCTCCTCTC
CACA

[1104] In some embodiments, the intronic domain that promotes trans-splicing primarily in the heart comprises or consists of sequences from the gene SERPINA5. In some embodiments, the sequences from gene SERPINA5 comprise or consist of:

(SEQ ID NO: 1045)
TCCCCTCATTCTTCTGAGCCCCAATTCAGTGATTGGTGCAATCAC
AGGCTTGGCTACAGTGACCCATTCATTGCAGGCATGGTGAGTCTC
TCAATCCCTCTCATTTCCACTAGAATCTAACTGTTGGGATCTATG
ACCCAGTCAGCATAGCAGGCCTGTGGGGAGCTCTCAGGTTCAAGC
ATATGCCCCCCCTAATCTACAAGAAATTAGCTGCAGAAAACCAAG
GAATAGAACCTGGAAAAAGAGAGGGTTTGCTAGAGCTGTCCCTTT
CCCTGTCTCTGGAATGCCAACAATAGGGAGGCTCTTTGGTCTTGT
CTCTCAGGAGTGCCCATGCCATTCCAGGAAAATGATGGCCCAGCT
GGTGGTGTAAGGCTTGGGGGGCAGCGAGTGGGCATCGTGGTGAAA
GCCTCGGGATCAGGGAGCTGCGTCTGCAGGCAGGCCTGCTGGCCG
GAAACCTGCCAGGAAAGGAAGGGGCTGTCCCGGGGCGGGGCCAGG
GAGG

[1105] In some embodiments, the intronic domain that promotes trans-splicing primarily in the heart comprises or consists of sequences from the gene SERPINA5. In some embodiments, the sequences from gene SERPINA5 comprise or consist of:

(SEQ ID NO: 1046)
TAAGTACCGATGCCGCAAAGGGAGGTCCCCAGGGCTTGAGGGCAT
GTGAGGCGAGGAGAGGATGGACTCTAGAGTTTTGGGGTTTGGGGT
CTGCAAAGCTCTGAAGGAGTCTCATCTCTGCAGTTTCAGGTATCC
AAGGCAGCAGAGGTGAGTGGGTCCCCCGAGCTCTGTGACCTTATG
CTCCACACTAACTCTGGCAGAGCCTCCGTTTCCTCATAGGTAAGA
TGGAAATAATTACACCCTCTGGATGGTGTGACTGAAGATTAAATA
CAGCGGGTGCTCTCACTCAGCACATCTGGCCATGTCTGCAGACAC
ATTTGGTTGCCACAACTGGAAGGGGGGTGGGGGTTAGTGACATCT
AGAGGCCAGCGATGCTGCTGATGATCCCACAATGCCCAGGACAAG
ATCACAAAGCATCATCCTGTTCAAAAGGTCAACAGGATCAAGGTT
GAGAGACCCTGAAATAAGGCCATGGGGACAAAATGTCGGCTGGAT
AGGA

[1106] In some embodiments, the intronic domain that promotes trans-splicing primarily in the heart comprises or consists of sequences from the gene PPP2R5C. In some embodiments, the sequences from gene PPP2R5C comprise or consist of:

(SEQ ID NO: 1047)
AGCGTGGTGGCGGGTGCCTGTAATCCCAGCTACTAGGGAGGTTGA
GGCAGGAGAATCACTTAAACCTGGAGACGGAGGTTGCAGTGAGCC
GAGATCACGCCACTGCACACCAGCCTGGGCAGCAGAGTGAGACTC
TGTCTCAAAAAAAAAAAAAAAAGTGAGCAATATCTGTGGTTAATC
TCAAATAGGGTGGCTTTCCGTGTCATTTCCCTTTAGTTGTTTTTA
AATGCAGATGTTGCTTTAATTAAATAATATTTGAAATAAGTGGGG
TCCCAACTATAACCTTATATCTTATTGTTTTTAAATGTTGATATT
TTGGTGTTTTCAGTAGAATTTGAGCTGTTAACAGTGATTAGGTTT
TTTCAGTTTGTCATCGATGTATGTGACCTCGTTATAATACACATG
GATTTTTGTCTGCTGGTTGTGTTACTCATGAGCAATGTGTTCTAA
TTATGGTATTTTAACTTATAACTTATGAAAAAGTTATGTTTCACT
CTAG

[1107] In some embodiments, the intronic domain that promotes trans-splicing primarily in the heart comprises or consists of sequences from the gene PPP2R5C. In some embodiments, the sequences from gene PPP2R5C comprise or consist of:

(SEQ ID NO: 1048)
TGGGTGGTGAGGGTGTCTGTATATGTGTGTTTACATTTGTAGACA
GTTTCTGTACATGTATAATTAGGAATGGGTTGTCGGTTTTGGTTT
TTTTCCCAGCTTTATGTAATTGGTCAGACTTCTCAAAGGGGGGTA
GCACTTGATAATCGCTCTCTTGGAACTCTGAAGCCTTTGCATGGA
GCAGTGTTCACCCTGGGCAGCCTGTGGCCCCTGGGGTCACAGAGC
TGCTTTCCAGGGGGTTTGCAAGGCCGTCACTGCCTCATAAGATTA
CCAAGATCTAATTTACCTCTCACTGTGTGGACGTTTGCCCTGGTG
GTGCAAAGGCAATGGTGAGGAATATGGCGCCTTTCTTTCATCGAG
CAGGACAGCGGTGTTCAGCTAGCAACACACCAGTCTGACCCAAGA
ATGTCCTCGATAAAGCATGAAGTTACTGGTTTTTTAAGTCTCAAC
TCTTTTGTATACCTTTTTAATTTTGTTTTTGTTTGGGTTTGTTTT
TAGT

[1108] In some embodiments, the intronic domain that promotes trans-splicing primarily in the heart comprises or consists of sequences from the gene SERF2. In some embodiments, the sequences from gene SERF2 comprise or consist of:

(SEQ ID NO: 1049)
AGGATCCGGCGTCCGGAGCCCGGGATCACCTGCCTAGCGGGCTTC
ACTTGGAGAGGTGGGGAGGCCAGAGCTTGCGGAAGCCGCTCCCTC
TCCCCTGCACCTTCTCCAGGGTCGCCGGCTGAGGCCCAAGGTCCC
TAGGGGCAGTGACTAGAGAAGAAGGGGGCCGGCCGTACCTGTTGC
CGCTGACACTCTTGCAGCGCCCGCAGGGCAGCGTCGTTGAGCCTG
AGCAGTAAGAGGCTAGTCCGGGCAGCTTGCGTGAAGCAGAGCCGG
AGCTGTCCTCTCAGAGGCTCCTGGAGCTCCTCCATGGCGACGAGT
TCGAGTGCAAGCAGCACGGGGGCCACAGGCGAGGGCCACCACCGC
CACCTCCTCTGTTCAGGGTTTGGTTGGCACACCCGGTAACCCACG
TCTGCCCCACCCTCCGCCAGGAACCCGCCCCCGGCCCCACCTCCC
GCCAGCGCCACCCCAAGCTTTCCCAGCCGCGTGGGCGGCGCTTCG
CTCT

[1109] In some embodiments, the intronic domain that promotes trans-splicing primarily in the heart comprises or consists of sequences from the gene SERF2. In some embodiments, the sequences from gene SERF2 comprise or consist of:

(SEQ ID NO: 1050)
TAATTGGGGCCCTGCGGTTGTGGTGGCAGCAGTGAAAGTTGGCTG
TCACCGACTGGAGCGCCCCCAGTTGGTGGGCAGGGATACGGGCGC
GGGTAGTGGCAGGAAAGTTGCAGGGCAGAGAGCCAGAACCCAGTC
CTAGGTCTCACCTCGTGGCCTAAACACGCGTCAGAGTGGTGAGAC
CGCTCCCTGAGGAGGGCCAGGAGCTGCCATGAAGTCGCCAGGCAT
TCCAGAGGGCCAGATCCTGGTGCACTGAGACCCCAGCACCAACCT
CTGGCCAGCCCTTGGTGTCTCCACTTGTTCCTGTTTGATTATGTT
TCCCAAGAGCCCCGATGTTGTCCTGTTTCCTAAACAGGATCCCTC
TGTTAAATCCCTGGACCTGCACAATCCCCGGGAACCTTAACGTCC
TCTACTACAAATAAAATTACCTATACATTTGTCAAAACTCATAAA
AAAAAAATACATTTTTTTTTTTTTTTTTGAGACGAAGTCTTGCTC
TGTC

[1110] In some embodiments, the intronic domain that promotes trans-splicing primarily in the heart comprises or consists of sequences from the gene AQP9. In some embodiments, the sequences from gene AQP9 comprise or consist of:

(SEQ ID NO: 1051)
GCCCGCTGCTGTGGCAAGAATGGCCTGGGGTCAGTGCTAGCTGTG
GCAGTGGCTGCAATACCCCTGGCTCTAAGGGCATCTTCAGTATAC
TGCAACACCCTCAAATTCTGGAGTGGTATTAGGGGTTACTGAGAG
CCCTCTGGGAATTATAAATTATTCCTAGAGCAAGACCAAGCCCCA
CTTTGGCTTACAGTTGACCTCGAAAACTCCAAGAATTCCCCCAAA
AGAGAACTCATTCCCAGGACCCTATCGAAGAATAATTTGTCCAAG
TTTGCAGTGGGCCATTCAGAGAGGCCAAAGGCCTTCTTCCTTTGA
CCCTCCATCCTGGGATTCACCTGGGCATCTCTAAAACTATCATTC
CTCGGAAGTAGAGAGAGACAAATGACATGGCTATGCCAAGCTCAA
TCTGAGTGACTGGTTGTTTAGCACAAGGCTTGGCACAGGCCTCCT
TCAACTCTTCCCAGGGAACACTAATGTGCCAGAGCTTTCTCTTTC
ATAG

[1111] In some embodiments, the intronic domain that promotes trans-splicing primarily in the heart comprises or consists of sequences from the gene AQP9. In some embodiments, the sequences from gene AQP9 comprise or consist of:

(SEQ ID NO: 1052)
TAAGTGTAGATTCAACAAAGACTTAACTTTGGTGAAAAGATATGC
TCTCATAAGGGGAATGCATTGGAGAATTAGAGACCAATCAGAAAG
GAGAGATTATATTTCCAAAGGCAGAGGTTGCTGGGCATAACCCAA
GCTTTCTTGATAATCGTTTTACCTTTACAAGGAGCTGATACCACC
AGAAAAGTTTTCTCCTTCCTCTTTAATACGTACACTTGTTTAACA
TTAGTTGAGATCCAGAAAAGAGTGAATGACTAAACATTTCAATCC
CTGTAGACACAAATGGACTTCACTTCACTATTGACTCTTTTGAAC
AAGTGGTCTAAGTGTGGAGGCCACAAGAGAAGATATTTCTATTTC
AAATCAAAGACTGTGAAGGGTGGTAGTTGAGCCTAGGGGATCATC
AATCCTCTCTGTCTCACCATGTGCATAGGTTTATTTATTTAAACT
CTCAAGGTGGCTAGAAGTATCTCTGCTTATTGACCTTTAAACAAG
CTTC

[1112] In some embodiments, the intronic domain that promotes trans-splicing primarily in the heart comprises or consists of sequences from the gene ANPEP. In some embodiments, the sequences from gene ANPEP comprise or consist of:

(SEQ ID NO: 1053)
GTAATCCAGCCCTGCCTTATGGGCAGCAGCCCCCACCCCATACTC
CTAGCTCCTGGCCCATGTTCTGAGGGCTGTGATGGGCCATTCCAT
TCAACAAATGGACTTGACTTCTTTGGTTCCAATCTCCACTTTGCT
GCTGCTTCGCTGTGTGACTCTGGGCAAGTTACCATCCCGCTCTGG
TCTCTAGTTCCTCTTCTATAAAATGAGGCTAAGAGCAATACTCCA
TTAGTTATGTGAGGATTAAAGGAGAGAATCCTAGGCCAGGCATGG
TGGCTCATGCCTGTAATCCCAGCACTTTGGGAGGCCGAGGCGACC
TGGGGTCAGGAGTTCGAGACCAGCCTGACAAACATGGAGAAACCC
CATTTCTACTAAAAATACAAAATTAGCCAGGTGTGGTGGTGCATG
CCTGTAATCCCAGCTACTCTGGAGGCTGGGGCAGGAGAATTGCTT
GAACCTGGGAGGCAGAGGTTGCAGTGAGCCAAGATCGCACCATTG
CACT

[1113] In some embodiments, the intronic domain that promotes trans-splicing primarily in the heart comprises or consists of sequences from the gene ANPEP. In some embodiments, the sequences from gene ANPEP comprise or consist of:

(SEQ ID NO: 1054)
CGAGAATCTGCAGGAGATGCCCTGGATGGCAGGGACTGGAGGGTC
CCACTGATGGCCACGCCCTCTCGCTCCACCCACAGGCTGTGAACA
ACCGGTCCATCCAACTCCCCACCACCGTGCGGGACATCATGAACC
GCTGGACCCTGCAGATGGGCTTCCCGGTCATCACGGTGGATACCA
GCACGGGGACCCTTTCCCAGGAGCACTTCCTCCTTGACCCCGATT
CCAATGTTACCCGCCCCTCAGAATTCAAGTGAGCAGATGGGGTCA
CTGAGGCATGGTCAGGTGGGTGGGGTAGAGGGCAGTTACTAAGGG
ACCATAGTAGGACTGGCCTCCTGTGGTCCCAGCCCCAGCCACTGT
AGACAGACCCTCCCTCCAGAGCCAGGAGTTCAGGGGCACTCGGTG
CCAGAGCTGGGCAGAAGCTGGGAGCCTGGGCAGCTGCTCCTCACT
GGCAGTGACCACACCGCCATCTCTCACCACCTCTGGATCTTTAAT
TGCA

[1114] In some embodiments, the intronic domain that promotes trans-splicing primarily in the heart comprises or consists of sequences from the gene PCSK6. In some embodiments, the sequences from gene PCSK6 comprise or consist of:

(SEQ ID NO: 1055)
ATGAAAATGAAAATGACAGATCTGAGGAAGAGGGAGAGCTCTCTT
GAAACCCCTTTCCCAGATTTGCCCTCAGTTTTAGGAATGAGGTAC
GCTTGGGCATTCCTGTTGCCTGCATGGTTCGGCATTCTGGCAGCC
AGGTTCGCCCCAGAATAGATAAGTGTGTTTGATTTTCGAACATTT
GACTTTATTACCTATTTCCAGAAACACTTCGTGTTCAAACTACGT
CTCTACAGGCATTTCTACTTGGTCTTTTTCTCCCCTGACATTTCA
CAGAGTCCTAACTGTGCTGCATGTATAACTTGTTCTTTCTTTTTG
TTACTTGCATAGCAAGCATGTTTCTATGTCATTAAATATCCTTTG
TAAGCAGCATTTTATAGATTTTTATAATACTTCACCAACAGAAGC
ACCATAATTTATTTAAGCATCTCTCTATTGTTGGACATGTAGATT
GCTTTCCATTTTTTCCTATTATGAGCGGACAGCTTAGTACAAAAA
GCCT

[1115] In some embodiments, the intronic domain that promotes trans-splicing primarily in the heart comprises or consists of sequences from the gene PCSK6. In some embodiments, the sequences from gene PCSK6 comprise or consist of:

(SEQ ID NO: 1056)
CACTTCCTTGCCTCGGCTCCCCCAGCCTCCCCCACGGTGAAGCCT
GGGCGTTGGAATGGCTGCTGACGTTCCCACCGGGGAGGAGCAGCG
GAGGCGCAGGGGCCGGTCCGACCCAGCGGGACCCCGGGGGGGCGG
GGGTTGTGGCTTTTCCCTCCACTTCCAGGTGAGGCTTGGTATCAG
GCCTCCCCAGCATCTGGCTGCCTGGAGGGGGCAGGTAACACAACC
CAGAAGGAAGGTTTACCCAAGGAAAGACAGGACATAAAGTGTATG
CCCTTCCTGTCTGAGGGCACATTGGTCTCACAAGGCCTGTTTGGA
AGACTTCCCCCAGCTAAGCAACCACCCCGTTTCTTTGTGGAGCTG
CAGCCAGCTTGAAACACAGCTCCTTCCATTTGTCAACCCCGGGCG
CTTCCTCCTGCTGCCCTCCACTCCTGTTGCCCTGGGATTGCACCT
CCCAATAAAGCTTCAGCCCATGGGCTTCACTTCAGTCCCTTGTTT
TCCA

[1116] In some embodiments, the intronic domain that promotes trans-splicing primarily in the heart comprises or consists of sequences from the gene ACSM5. In some embodiments, the sequences from gene ACSM5 comprise or consist of:

(SEQ ID NO: 1057)
GTTAACTATGGAAAGAAAAGAAGAAAGACAGGCAAGAAAGAGGGAAGAA
AATAGGAAGAAAATGAAGAAGGAAGGGAGGGAGGAAATAAAGGAAAGAG
AAAGGAAAAGAAGGAGGAAAGGAAGGGAAAAAGATGAATGGAAGGAAGG
AAATAGGGAACAAAGAAGAAGGGAGGAGAGAGGAAAATGGAGAATGAAA
TAACGGGGAAAAGAATGAAAAAAAGGAGGAAAGAAAATGAAGGAGGGAA
GGAAGAAAACAGGAAAGGGGAAAGAAAGGAAAGAAAGAGGAAAGGAAGG
AGTGAGCAAGGAAGAAAAAAGAAAAGAAAGAAGGGAGGAAGAATGGAGA
GAAATGGAGAGAGGAGAAGGGAAAGAAAGAAGAAAGTGAGGGAGGAGAA
AAAAGAGGATGAGAGAAAGAGTTATCAGGCAGGGTGAGAGAAAGGCATG
GCCCAGGAAAGAAGCTAAGTGGAAAGGCTCTTCTTTATCTGTACTGCGT
TCTCCCCAG

[1117] In some embodiments, the intronic domain that promotes trans-splicing primarily in the heart comprises or consists of sequences from the gene ACSM5. In some embodiments, the sequences from gene ACSM5 comprise or consist of:

(SEQ ID NO: 1058)
TAGCAGCCTCCCCCAACTTCTGGCAAGGCCTGGCATGGAGAGGAGAAAG
ACACACAGGCCTGGTTGGCACGGGCTGCTGGGCTGCTGGGAGAGGCCCA
GGGTGTAGACACTCACGTATGCACCTCTGTGATGATTTCCTTACCAGAT
TGTGGATGATGAGGGCAACGTCCTGCCTCCTGGAGAAGAGGGGAATGTT
GCCGTCCGTATCAGACCCACTCGGCCCTTCTGTTTCTTCAATTGCTATT
TGGTAAGAGACGGGGAACAGCCGTTCTCATGACAGTGACTGTGTGCTAA
GCATTGTGCACCACACTTTGTAAATATCTATTTGTTTAATCCTTACAAT
GACTGCATGAGGTAGGTTGCTACTATTATTAATAAAGTTCTGTTATTGA
TAAGGAAGACTATTATTGATAAGGAAGCTACTACAAAGGGGAAGTGACT
TATCCAGCATCATGCAAATAGTACAGGCAGGACATGGGATTTAAATGTG
GGTGTGTCT

[1118] In some embodiments, the intronic domain that promotes trans-splicing primarily in the heart comprises or consists of sequences from the gene ACSM3. In some embodiments, the sequences from gene ACSM3 comprise or consist of:

(SEQ ID NO: 1059)
GCTGTGGATCAGAGGACCCTGTGCCAGATCATACAACTCCTTGCAGTTC
ATGTAAGGACTCGGATTTTACCTGGAGTGGAAAAAGAAGCACTGAAAGA
TTTGAGCAGGGGAGTAACCTGATAGCGTTTATGTTTAGTCCTGCCACTT
CGACAGATAAACGCACCAATGGGCTTGATGAGATTTAGGCCAACCCATA
ACCGCCCCTCAACTTCTTTCCTTTCAATTTCAAAACTCCTCTATGGCTT
CCTCCATCTGTTCTTCCTTCTGAGAAGTGCTCTCTCTGCCCCTTTACAG
AACTAACCACTTCGGCAACTCCTTGGACACTTTCCTTCTTGTTAATAAT
TTGCTTTCTCCGCCCCTCAAAAGCTTGCTGTTTCTGTAAATCATTACCT
GTAAGAGGAACCGCTGGGAGTCCTGTAAACTTTAGCCCAGAGCTTGGCT
CCTCCTCCAGAATGTCTCCACCAATCAAGGAAAGTGTTTTGGGCCAGTC
TTGCTCCTC

[1119] In some embodiments, the intronic domain that promotes trans-splicing primarily in the heart comprises or consists of sequences from the gene ACSM3. In some embodiments, the sequences from gene ACSM3 comprise or consist of:

(SEQ ID NO: 1060)
TGAGTACCTCATCTCCCCTCCTGTGTAAGATTTCCTGAACTGGCACATC
TGTTTTTTGAGCAAAGATAACAAACAGATGAACAAAACCAACAATCAAA
AATGCTGTCATTAAAGTCTTGGGCAGCCAAAGTTTCTCTCAGAATTTCT
CAGTTGTGTGATACTATCTATTAAGTGATGAGGAGTATGCACACACAAA
AGGCTATAAATGTAGCAGCTGAGTTTTCATGTTGAGCCTTTTGGTGCTA
TTTGATTTTTTGAAAAACTATGTACATGTATTAAGTTGATAAATTTTTT
TTTTAATTTTAATTGAACCAGATGCGGTGGCTCAAGCCTGTAATCCCAC
CACTTTAGGAGGCTATGGTGGGCAGATGCAGATCACTTGAGGCCAGGAG
TTCGAGACCAGCTTGGCCAACATGGTGAAACCCTATCTCTACTGAAAAT
AAAAAATTAGCCAGGTGTGGTGGCAGGTGCCTGTAACCCCAGCTACTTG
GGAGCCTGA

[1120] In some embodiments, the intronic domain that promotes trans-splicing primarily in the heart comprises or consists of sequences from the gene TMED6. In some embodiments, the sequences from gene TMED6 comprise or consist of:

(SEQ ID NO: 1061)
GTCTGTTTTCATTACCATGGCTATTATAATAATCATAGGGTCCTATGAA
ATTACAGAAATAATGAGGAAGTATACAGAGATGTTTTAACAGTAGGAAA
AAAATTCAGCCTTTAACACCAAAAACCAGTGTTCCTGGAGGCTGCTGAC
CTCCAAGGATGCCAAGTGGCAGTCTACTGACGATTTGGGGGCAACACTC
CAGGTGAGCATTCTAAGTCTAGGGTTCAGCCGCTCAATTTTATCTCATC
ATCTCCAGTTAATCAGATTCTGGGAAAGTGACCAAAAAACAGAGACCCA
TTTATAATACAGAATTCCAATTAACAAATGGATTACAGGGAAGCATGTC
TTTCCAGTCATCAGAATATTTGAGTCAGTTACTAAAAGCAGATTCAGAA
CAAAAGAAAATGCATGATATCCATGTGAGATATCCACACTCCACAGCAA
AGCACTCCTCCAGCCAGGTCAAGCCTGTCCCACTTTGGAGAGCAGCAGT
GTCTTAACT

[1121] In some embodiments, the intronic domain that promotes trans-splicing primarily in the heart comprises or consists of sequences from the gene TMED6. In some embodiments, the sequences from gene TMED6 comprise or consist of:

(SEQ ID NO: 1062)
TATAGGCGCACGCCACCATGCCAGGCTAATTTTTGTATTTTTTAAGTAG
AGACAGGGTTTCACCATGTTAGCCAGGCTGGTCTCGAACTCCTGACCTT
GTAATCTGCCCACCTCGGCCTCCCAAAGTGCTGGGATTACAGGCGTGAG
CCACCGCGCCCGGCCCAGAATCATACATTTTAGTGGATCCACACTAGCT
GTGTGTTCCGAGCAAGGCATGTCTTCTTCACACGGGTGCTGTTGGCATT
CTGGGCAGTTCTTTGTCCTGCTGTACTGTTTCTTACATTGCAGACGTTC
AGCAATGCTGTGCTGCCTCCCCTTAACACCATCACTGTGATACCTCAGA
ATCCTCCAATCAACTCCAAACCCCAGCAGGGGGTTGGGCAGTCCCACCC
CAGACAGAGACCGCTGTGCTGATGACCGTGGGACGTCAATCTTACCACT
CAGCTGGCTTCCTCGTGATGTAGCAGGGGTTCTGCTACCTATTTAATGT
GTCTTGGCA

[1122] In some embodiments, the intronic domain that promotes trans-splicing primarily in the heart comprises or consists of sequences from the gene HPR. In some embodiments, the sequences from gene HPR comprise or consist of:

(SEQ ID NO: 1063)
AGGGGGCTGGGCGTGATGGCTCACACCTGTAATCTCAACACTTTGGGAG
GCTAAGGCGGGTGGATCACTTGAGGGTGGGAGTTTGAGATCAGCCAGAG
CAACATGGAGAAACCTCGTCTCTACTAAAAATACAAAAAATTAGCCAGG
CATGGTGATATATGCCTGTAATCCCAGCTACTCGGGAGGCTGAGGCAGG
AGAATTGCTTGAACCTCGGAGGTAGAAGTTGTGGTGAGCTGAGATCATG
CCATTGTACTCCAGCCTGGGCAACAGGAGTGAAACTCTGTCTCAAAAAA
AACAAAAAACAAAAAAGAACACCACGGGAAAATCAAGTGTGAAGCAAGA
GCTCAACTCTTAACAGGGGCAATGTTTGGAGTTTTGTTACTGGAAAAGA
TAGAGACCTTACCAGGTCCAAAGTTTGTAGACACAGGAATTACGAAATG
GAGAAGGGGGAGAAGTGAGCTAGTGGCAGCATAAAAAGACCAGCAGATG
CCCCACAGC

[1123] In some embodiments, the intronic domain that promotes trans-splicing primarily in the heart comprises or consists of sequences from the gene HPR. In some embodiments, the sequences from gene HPR comprise or consist of:

(SEQ ID NO: 1064)
TGGGTCCACAGCTTTCCCTCCTGCCTTTCCTCTGGTTCTTTATTTCAGT
CTTTTTTGCATACATTGGTACAGATGCAGAAATAGAACAAAGAAACAGG
GCAAATGGGCTAAATTATAGTGAACCAAAGGGCTTAGTGTGTTAAATCT
TCTCCTTTTCTGCATCCATAGAAGACAGTGCTGCTGTCTTTCCCAGGAG
ATAAGATTTACTCTCAGGAGTGTCTTTTTCCTTGAGGTTACGTTTTTGT
CTTTGTAGGGTATGTCATCAGCTCCCGTGGTAGGCTTCCTGGCATTCGG
AATATATTTACTAGCAGATATTTTCCTCTTTAAAAATGTATAATAAGAA
AGACTAATAGTAACACATTTGAATGACACAATTAATTGACTAGTACTTG
GGATACACACTAGTACCTGGGATACATCTAATTAAGACACTTAGATCTT
AAAAAATAAAAAGACTTTTTGAAATGTTGAAATAATAAGACTAGAAACT
TTTTTTTTT

[1124] In some embodiments, the intronic domain that promotes trans-splicing primarily in the heart comprises or consists of sequences from the gene SERPINF2. In some embodiments, the sequences from gene SERPINF2 comprise or consist of:

(SEQ ID NO: 1065)
TGTCCCCCAGGCTGGAGTGCAGTGGCTTGATCTTGGCTCATGGCAACCT
CTGCCTCCCGGGTTCAAGCAATTCTCCTGCCTCAGCCTCCCGAGTTGCT
GCGATTACAAGCGCCCGTCACCACAGAAGCCCAGCTCATTTTTGTATTT
TTAGTAGAGATGAGGTTTTGCCATGTTGGTCAGGCTGGTCTTGAACTCC
TGACCTCAGGTGATCTGCCTGCCTCGGCCTCCCAAAGTGCTAGGATTAC
AGGCGTGAGCCCCCATGCCCGGCCACACTGCTAGAAACTTTAAAAGCAT
CTCATTCGGTTACGTGTCCGCCTGCAGTGGGACAGGTAGTATGACTCCA
CCCCACTGTGAGGAAGTGGAGGAGCAGTGGGGTCAGTCACACGCCTGGC
AGGATGGCCAGGAGCCCCATTGTCTGCCTTAGGAGCACCTGCTGGCCCC
ACCCCCACTTAGCTTCGGGGCTTTCTGTCCTCATGCTCTTCCCTTCCCT
TTTCTGTAG

[1125] In some embodiments, the intronic domain that promotes trans-splicing primarily in the heart comprises or consists of sequences from the gene SERPINF2. In some embodiments, the sequences from gene SERPINF2 comprise or consist of:

(SEQ ID NO: 1066)
TAAGGAGGAGGGTGCGGGCGAGCCCCCGAGGTCAGGCTGGGCAGGGCGG
GTAAGGAGGAAGCGTCTGGCTGGCAGTGGAGCTGAGTCAGAGCTGTCCT
GTGTCCTGCTCTTTTCCAGGGCTTCGGGAGCGGGGAGAGGGTTGAATAT
GAGCCCCCAGACCCTCTGTCCTAGAGGAAGTTGGGGTGGCCCGGGGAAT
GGGGCTCTGCTTTGCTGCCCAAGACCTCGCATTGCAAGGAGAGTCTGGG
TAGAGAGCCTGGGATGGCATGTGAGCCTCGCTGGCTTCCCTGGAAGGGG
AAGGAGGAGAAGCTGGGGTGTCACACTGTTAAAGAAATGCTGGGTGGAG
TGGCTCATGCCTGTAATCCCAGCACGTTGGGAAGCTGAAGTGGGTGGAT
TGCTTGAGCCCGGGAGTCCGACACCAGCCTGTGCAACACATTGAAACTC
CGTCCCTACAAAAAATACAAAAATTAGCCAGGTGTGGTGCATGCTACTG
GGGAGGTTG

[1126] In some embodiments, the intronic domain that promotes trans-splicing primarily in the heart comprises or consists of sequences from the gene SLC13A5. In some embodiments, the sequences from gene SLC13A5 comprise or consist of:

(SEQ ID NO: 1067)
CTGTGCTGCTGACTTGTCTCTGGTTTTCTGCAGTGTGGGGAGCCCAGGG
AGGTGGATGAATGAACAGTTAGTTACGCCCTGCCCACCTGCTGGGTGCC
AGGCCTTCCTGTCCCTGTTGAATCCACTAGTTATCTCGTTCGATCTTTG
CAGCAACCCTGTGAGATAGGAAGGTGTTATTATCTTGCTTTGTCTTTCA
AAAAAAAAGCGAGGCTCAGGGAGGCCAAGGGAAGTGTCCAAAGTCACAC
ATCAAGTTACTGGCAGTTACAGTTCCAACCAAGAGCTTCCAACTCCATA
CCCCCTGCTCCTTCTGCTAGCCATGAAGGGCTTTGGCCTTATAGGGCTT
GTAGGGAAAGGTGAGTGGCCAAGAGCAAGTCCATGCCAAGGGAAGATCT
CCAAACATGAGTCCCTGTCTGTTGCCTCCCCTGAGATAGGCACAGGACA
AGTGATCAATGAGACAGGGTGGTCCTTGCCCTAAGAAGCAAAGTGTTTG
GTTGGGGAG

[1127] In some embodiments, the intronic domain that promotes trans-splicing primarily in the heart comprises or consists of sequences from the gene SLC13A5. In some embodiments, the sequences from gene SLC13A5 comprise or consist of:

(SEQ ID NO: 1068)
CCATGGACTGCAAACTTGACTCCAATCCCCAGTAAAATATCTACAACAG
GGTAGTGAAGCGATGGTTAGTGACCATGAGGGAAGCTTGCAGAGCAGGC
ATCAGAAAGAGCCTGAGGAGGTCCACAGGGAAGCTGGCACGTCCTTGTA
GGATAGTTAAGGCACTGGGGTGAGCAATGAACCTGGACTCACGGAACAC
TGGGCTCTGTGACCGTTTCCCTGAATGGCCTAAGCTGTTGCCTCCTGTC
ACTTCTCTGAGGTCATTTTCCAAATGCGCACGGGCATAGAGAACCCATC
CACTCTGCCTACTTCCCAGGGATGCCTTGAGCACTGAGGATACCTGGGG
GACATGAAGTCGCACTGTCCTGGGGGTCGGGACACCCCAGCCAGGGACA
GAGCATGGCACAGGGACATCGAGGCCCAGTGAGCCGACCCTTTGTCCTC
CTCTCTGAGAGCACTAGTCCCCAGCAGGCCTCAGGGTGCTGACTCTGTC
TCTTTTCCA

[1128] In some embodiments, the intronic domain that promotes trans-splicing primarily in the heart comprises or consists of sequences from the gene ASGR2. In some embodiments, the sequences from gene ASGR2 comprise or consist of:

(SEQ ID NO: 1069)
GTGAGGCCACGCTTCCCACAGGCAGGAGGAAGCCCTTGGAAGGCCTGCT
CTGGGAGGCTGGATCAGGCTTATTTTATCCATTTTTTTTTTTTTTTTGA
GATGGAGTCTCGCTCTGTCGCCCAAGCTGGAGTGCAGTGGCACGATCTC
GGCTCACTGCAAGCTCCGCCTTCTGGGTTCACGCCATTCTCCTGCCTCG
GCCTCCCAAAGTGCTGGGATTACAGGCACGTGCCACCATGCCCGGCTAA
TTTTTTTGTATTTTTAGTAGAGACGGGGTTTCACCGTCTTAGCCAGGCT
GGTCTGGAACTCCTGACCTCATGATCCGCCCACCTCCGCCTCCCAAAGT
GGTGGGATTACAGGCGTGAACCACCGCGTCTGGCTGAACTTCAAAGTAT
TTTAATGCCACAGTAGTTAAGCCATATGATACAGGGGCCAGAATATATG
TATTGTTTGCATTACATCAGGCTCTGTTAGTACTTTACAGCATACTGTG
AGTACGAAC

[1129] In some embodiments, the intronic domain that promotes trans-splicing primarily in the heart comprises or consists of sequences from the gene ASGR2. In some embodiments, the sequences from gene ASGR2 comprise or consist of:

(SEQ ID NO: 1070)
TGTGTAGTGTGGTGTATATGTGTGTGTTGTGTGTGTATGCATGTGTGGT
GGTGTGTGTGAGATGAGTCTGTGTGTGTGCGGTATGGTATATGTGTGTG
TACGCATGTGATGTGTGTGGTGTGTCTCTTGGTGTGTTTGTGTGTGTGT
GATGGATCTGTGTGTGGTGTGGTCTATGTGTGGTGTACATGTCTGTGGT
GTGTGTGTGGTATGGTGTGTGGTGTGGTCTATGCATGGTGTACGTGTCT
GTGGGTGTATATGCTTCCCCAGCCACAGGCTGGAGCCTAGCAGGTGGGG
ACCACACCTGCCGGCAGCACTTTCAGCCTGTCTGTCCTAGATCACGATG
CCCTGCTCTTCCATCTGAAGCACTTCCCCGTGGACCTGCGCTTCGTGGC
CTGCCAGATGGAGCTCCTCCACAGCAACGGTAGGGGTGGGGCCGTCTCC
AGGCCCAGTGTGCCTGCCCCTCCGGCTGGATCTCATCTCCCTGCCCCCT
GTCCCCTCA

[1130] In some embodiments, the intronic domain that promotes trans-splicing primarily in the heart comprises or consists of sequences from the gene TMEM220. In some embodiments, the sequences from gene TMEM220 comprise or consist of:

(SEQ ID NO: 1071)
GTCAGGCGGCCGCGGTGGGAGGGGGACCCGCCCGGCTCCCAGCTCCGCC
CCCTGGCCTAGCGGGCCGTGTAACTGACTAGCGGGCAGAGTCGCAGGGG
CGCACAGTTAGTGGGGAGGACGGGACTTGGGCTTTCTGCTTGGGGAGCC
CCCACTTTCTCCCCCGTCTAAGAGACGCGGATGTGTTCATGGAAGCGAG
TCCCATACCAGGGCTCACACCCTGGAAGGGGCTGGTTCCGCGCGTGGAA
CTTCCCAGGGGACCTCAGAAGAAGCGGCCCTGGCTCCTGCGTTAACGTC
CGGCCCGCGGACGACACTGAACATATCTCAGGGCCTAGGAGACGAAGCC
GACCAAAACCCTTTATAGCATCATTAAACTTTTTAGTCGGCTTGGGGAC
CCCCTTCATAATCATTTCCCTCATTTCTTGAGACTGGTGGGGGTGGAGG
GCCCTTAAAATACCCGTTCTGGGTTGGCGAGTCCTCTCCAGAGCTCCCG
TGAAGGCTT

[1131] In some embodiments, the intronic domain that promotes trans-splicing primarily in the heart comprises or consists of sequences from the gene TMEM220. In some embodiments, the sequences from gene TMEM220 comprise or consist of:

(SEQ ID NO: 1072)
TGAGCCGTATAAGATGTTAATATAACTGTCGTCACTCTAGAAATT
ACCATAATGCTTACAGGGATTTGAAAGTTCCTGAGCTTTGGAAGG
AAATGCATAAATACTAAACAGAACACACACACACACACACACACA
CACACACACACACACACACACATCTCTTTTTCTTTCTCTTTCTTA
TTTTTGTAAAAACAATTTTTATCCTTTTTTTTTTGAGGAGTCTCG
CTTTGTTGCCCAGGCTGGAGTGCAGTGGCACAATCTGGGCTCACT
GCAACCTCCGCCGCCCGGGTTCAAGCAATTCTCCTGCCTCAGCCT
CCTGAGTAGCTGGGATTACAGGCTCCCGCCACCACGCCCGACTAA
TTTTTTCGTATTTTTAGTAGAGATACGGGGTTTCACCATGTTGGC
CAGGCTGCTTTCGAACTCCTGACCTCAGGTGATCCGCCCACCTCG
GCCTCCCACAGTGCTGGGATTACAGGCGTGAGCCACTGCGCCCAG
CCCT

[1132] In some embodiments, the intronic domain that promotes trans-splicing primarily in the heart comprises or consists of sequences from the gene NCOR1. In some embodiments, the sequences from gene NCOR1 comprise or consist of:

(SEQ ID NO: 1073)
TCTGAATTTTCAGAGTGAGAATTGTTGTCCTGTCCTTGAAGCAAA
TCACCTTCAAGTATTACAGTGTAATATTCACATTCTCTGGTAGAT
GAGAGACACAACTTTGTGTAGTGGATATTTCCAATCAGACGCTGG
CTAAGCCTTCACCTTGGCATTTGCCAGCTGTGTGGCCACAGGCAA
GTCACTTAACCTTTCATAGCTTTAGTTTTCTCATCTGTAAAATGA
AAATAATAGTACACGTCTACCTTGCTGTGGTTGTAAAGTTAAGGA
AGGAGCATTCGGTATTGTTATATAACAGGTGGCTCTGCATTATTT
TATGTATAATGTAGCACGTTATTACATATTAATTAGTGTATTAGT
ACTGTATATACACAGTAGATACTATGGAGGTACCTGTTTTCATTG
TTACATCACTGTTTTTATTTCAAGTGATGGATTTGAGTTGGTCCG
TTGCTGTTTTAGTTGGTGTGTGATACACTTTTACTTTCTTTAAAA
AAAG

[1133] In some embodiments, the intronic domain that promotes trans-splicing primarily in the heart comprises or consists of sequences from the gene NCOR1. In some embodiments, the sequences from gene NCOR1 comprise or consist of:

(SEQ ID NO: 1074)
GGCATGCCTCACTGCACCCAGCTAAATTTTTGTATTTTTGGTACA
AAGATACAAAATACCAGCCAGGCTGGTCTTGAACTCCCGACCTCA
GGTGATCTGCCTGCCTCGGCCTCCCAAAGTGATGGGATTACAGGC
ATGAGCCACTGCAATGCCTTAAGCATTATTCTTGAAGATAACTTT
GATTAAAAAATGATAAAATCAATTCAACCAATAACATGACAGAAA
TAAGCATTACATTACTTGTTAAGAGATGGCAATTATTACATTGGT
TGTTTGCATATTTCGATTTATTTTCTTCCTATAGGTATCCTGCAC
CCCATGTAACATACCAATTGGAACCCCAGTGAGCGGCTATGCTCT
CTACCAGCGACACATTAAAGCAATGCATGAGTCAGCACTCCTGGA
GGAGCAGCGGCAGAGACAAGAACAGATAGATTTGGAATGTAGAAG
TTCTACAAGTCCATGTGGCACATCCAAGAGTCCAAACAGAGAGTG
GGAA

[1134] In some embodiments, the intronic domain that promotes trans-splicing primarily in the heart comprises or consists of sequences from the gene UBB. In some embodiments, the sequences from gene UBB comprise or consist of:

(SEQ ID NO: 1075)
TAAACTGCCTCTCGGGAGGTTGGGCGCGGCGAACTACTTTCAGCG
GCGCACGGAGACGGCGTCTACGTGAGGGGTGATAAGTGACGCAAC
ACTCGTTGCATAAATTTGCGCTCCGCCAGCCCGGAGCATTTAGGG
GCGGTTGGCTTTGTTGGGTGAGCTTGTTTGTGTCCCTGTGGGTGG
ACGTGGTTGGTGATTGGCAGGATCCTGGTATCCGCTAACAGGTAC
TGGCCCGCAGCCGTAACGACCTTGGGGGGGTGTGAGAGGGGGGAA
TGGGTGAGGTCAAGGTGGAGGCTTCTTGGGGTTGGGTGGGCCGCT
GAGGGGAGGGCGTGGGGGAGGGGAGGGCGAGGTGACGCGGCGCTG
GGCCTTTCCGGGACAGTGGGCCTTGTTGACCTGAGGGGGGCGAGG
GCGGTTGGCGCGCGCGCGCGTTGACGGAAACTAACGGACGCCTAA
CCGATCGGCGATTCTGTCGAGTTTACTTCGCGGGGAAGGCGGAAA
AGAG

[1135] In some embodiments, the intronic domain that promotes trans-splicing primarily in the heart comprises or consists of sequences from the gene UBB. In some embodiments, the sequences from gene UBB comprise or consist of:

(SEQ ID NO: 1076)
GTTTGTGTGGTTTCTGGAAGCCTTTACTTTGGAATCCCAGTGTGA
GAAAGGTGCCCCTTCTTGTGTTTCAATGGGATTTTTATTTCGCGA
GTCTTGTGGGTTTGGTTTTGTTTTCAGTTTGCCTAACACCGTGCT
TAGGTTTGAGGCAGATTGGAGTTCGGTCGGGGGAGTTTGAATATC
CGGAACAGTTAGTGGGGAAAGCTGTGGACGCTTGGTAAGAGAGCG
CTCTGGATTTTCCGCTGTTGACGTTGAAACCTTGAATGACGAATT
TCGTATTAAGTGACTTAGCCTTGTAAAATTGAGGGGAGGCTTGCG
GAATATTAACGTATTTAAGGCATTTTGAAGGAATAGTTGCTAATT
TTGAAGAATATTAGGTGTAAAAGCAAGAAATACAATGATCCTGAG
GTGACACGCTTATGTTTTACTTTTAAACTAGGTCAAAATGCAGAT
CTTCGTGAAAACCCTTACCGGCAAGACCATCACCCTTGAGGTGGA
GCCC

[1136] In some embodiments, the intronic domain that promotes trans-splicing primarily in the heart comprises or consists of sequences from the gene LRRC75A-AS1. In some embodiments, the sequences from gene LRRC75A-AS1 comprise or consist of:

(SEQ ID NO: 1077)
CCTGAGGTCAGGAGTTCAAGACCAGCCTGGCTGGCCGACATGGTG
AAACCCCATCTCTACCAAAAATACAAAAATTAGCCGGGTGTGGTG
GCGTGTACTTGTAATCCCAGCTACTTTGGGGGCTGAGCCAGGAGA
ATCGCTTGAACCCGGGAGGCGGAGGTTGTAGTGAGTCGAAATCGT
GCCACTGCACTCCAGCCTGGGCAACAGCGAGACTCCATCTCAAAA
AAAAAAAAAAAATTACAACCTACTGAGAAGCTAATTAAGATTTGT
AGTCCTCAATAATTTACAAAAACTTAGAAAAATTACCTCTAATTA
GGTCTTAAGGGGCTTTTGTTAGGATGGACTTAAATTTGTAAAGTC
ATTAATTGACTGTCATCAGAAATGCCTGTCCTGCTCTGCATCTGC
AGTCTCTAAGGTGTATGCGCCTTCTCCATTCCCCCAGGTTTTGAG
AACAGAGTGCTGTTTTAGAGCTGGCAGCAGCATCTCAGCCCAAGA
GAAG

[1137] In some embodiments, the intronic domain that promotes trans-splicing primarily in the heart comprises or consists of sequences from the gene LRRC75A-AS1. In some embodiments, the sequences from gene LRRC75A-AS1 comprise or consist of:

(SEQ ID NO: 1078)
AAAAAAAGATATCAAATGATGAAATCACCCAAAATAGCTGGAATT
ACCGGCAGATTGTGTAGTGGTGAACCTATGGTTTTCTGAAGATAT
CTCTTACCCTGTGATTGACTGTCAGTTGGTGCAGAAAGTGAGATT
GAAATGTAGTTTCTTTGCAGGTTATATTCCCAGAGGATGTCAGTC
CCAAGGACCAGTAGCTGCCATCAGTTTGGATTCTGAAAACTAACT
GGCATCAACACTGGGTGTAGAAACATGCTTGCCTTATGTATCAGA
GGACATGCTCAGCAGATCCAAGAGATATATTTGGCAACTTTTTCT
AGAAAAGGCACATTGGGTATCATTCATTACATTCTTGAGTTTTTT
TGGGTTTTTTTTTTTTTTTTTGAGACAGTCTTGCTGTATTGCCCA
GGCTGGAGTGTGGTGGCACAATCACAGCTCATTGCATCCTCAATC
ACCCAGGCCTAAGCAATCCTCCCACCTTGTAGCTGGGACTACAGC
TCAC

[1138] In some embodiments, the intronic domain that promotes trans-splicing primarily in the heart comprises or consists of sequences from the gene SKAP1. In some embodiments, the sequences from gene SKAP1 comprise or consist of:

(SEQ ID NO: 1079)
GTAAGGACAGAAAGTGTGGGGCTTAAATAGAAAGTCAATTTTTTC
ATTCTTGATTTAGTCACCATAAACAGAATTATTCCATGTCATACA
CTTCCCATGGCTCCCTCACAATATAAATTCCCATTTATTCATAAT
TGTTAGGAAAAGTTTTAAATGAAAATCCAGATTCAGGAACCATTT
TCACATTTAAAAATACAAGGCTAGGCCGGGCGTGGTGGCTCACGC
CTGCAATCCTAGCACTTTGGGAGGCCGAGGCTGGTGAACTGCCTC
AGCTCAGGAGTTCAAGACCAGCCTGGGCAACATGCTGAAACCCAG
TCTCTACTAAACTACAGAAAATTAACCAGGTGTGGTAGCACATGC
CTGTAGTCCCAGCTACTTGGGAGGCTGAGGCATGAGAATTGCTTG
AACCCGGGAGGCGGAGCTTGCAGTGAGCTAAGATCACGCCACTGC
ACTCCAGCCTGGCGATGGAGCAAGACTCCATCTCAAAAATAAATA
AATA

[1139] In some embodiments, the intronic domain that promotes trans-splicing primarily in the heart comprises or consists of sequences from the gene SKAP1. In some embodiments, the sequences from gene SKAP1 comprise or consist of:

(SEQ ID NO: 1080)
CAAAGTTCCTATGGACAAAGAAGGCCGAAAAGTGAGCTGTGATCC
AGAAGCCTGCTGGCTGACTAAGCCTTTCTTGTAAATAGGCAGAAG
TCACAGATTTACTCTGATCCTTCAAATGCATAATGAAGAGAAAAA
CTAGATAGTTAGTTGCCCTGGATCAGGAAAGTCTGGCGGGAAACC
TCTGCACTGCTTACTTACAAACCAAGTGAAAAATTACCTGCCTGA
TTTTCTTTTATTAATAAATAAATATATTTATCATATTGTTGAACG
GCATCCTACTAGGAGTGATCTGTAAATATTTAATGTTAGTTAATG
ATCTCCTTCTCCCATAGTCCTTTGCTCATGCTGAGTGTTTGGCTG
TATCTCATCTCAACTCCCCTTAATCTGAGGTTTCCTAGGGGCAAT
ATCAGAACCCTGGTTTCCATTTGCAGCAAAAACATGGGTACCTCG
GAAAAAATAGAGTCCTTTTAACTTTGATTTCTCCTCTCTTTGATC
AGTA

[1140] In some embodiments, the intronic domain that promotes trans-splicing primarily in the heart comprises or consists of sequences from the gene TOM1L1. In some embodiments, the sequences from gene TOM comprise or consist of:

(SEQ ID NO: 1081)
ATTCACCAACAGTTCAGTGATACTTGAATTCTGGTCTTCTTTCCC
AATCAGGCTGCTCCTATTATTCAGAGTCCTCAAATACTTGCTCTA
TGCATTCCGTCCACCTTTAAGTGACATTCAGTGGAGAGACAGAGT
GCAGTACGTTTGCTCCGCTTTATCCTGGACCGGAGACCTCACAGC
TTTCTTCTTAACCTGTGTTCTATACTACTTCTCATCCTTTAAGAA
ACGATGGGGTGGTAGCTACACTGATGGAAAGACTAAAGGCTCTGG
TCTTAGTGTTCCGTGCACACTCCACAGTCTCAGGGCTCCCACCAC
CCATGGCATCATAACCTGATGTGCACTAAAACCAATTGTTTTATA
AACAGTTATTACAAAATGACACTTTATGCAGTCTGAAGGTACCTT
TTAGGTTTTGTTTTTAGACTAGGAAAATTATCTTACTTTTTGCAT
TTGTGTTCTCACTGTAGGGTAATCATTCTGTGTTATCACACTATC
CTAG

[1141] In some embodiments, the intronic domain that promotes trans-splicing primarily in the heart comprises or consists of sequences from the gene TOM1L1. In some embodiments, the sequences from gene TOM comprise or consist of:

(SEQ ID NO: 1082)
TAAGTAACAAAACTCTTTTCTAGCAGTGCATCTAGTCAGCAGATT
ATTGTAGCCAGAAAAGAACTCATGGTCATTAATTCCCATGTTCTG
CTCAGTATTGTGTTGATGCGCAGCCCCTGTTAGCAAGATGGTAAG
GATCAAAATTTTTTTGGAGTTTGTATTTGCTATCTCCACTTCCTT
TCCTTGTATTCTCTTTGACTTCAGACATGCTCTTCTACCACTCTA
TGGACATAACTCTTGTCAAGGTCACTGGTGACTTCTGTATTGTGA
AATTTAGAACTGCAGTTCCATAGTCCCTCATTTTATCAGCAACAA
ATGACAAAGTTGATCACTTCCTCCTTCTTGCACACATGGCTTTCA
GACACCAGTCACTTTGGTTCTTCTCCTGCCTCACGTTCATTTCTT
CTCCATCTCTTTTGGTGGCTCTTCCTCCTCTACTGACCTTTTCTT
GTTGGAGACCCCAGGGATCAGGCTTCAGACTTTTCTATCTACATT
CATT

[1142] In some embodiments, the intronic domain that promotes trans-splicing primarily in the heart comprises or consists of sequences from the gene ABCA6. In some embodiments, the sequences from gene ABCA6 comprise or consist of:

(SEQ ID NO: 1083)
GTAAGTTGATACATTTATTACCACTTTCTCTGCTTTAGATCTTAG
CTATATGTAGCTAATATTAATGCCCTAGTAGGTTACTGCAATCAC
TACTTTCATGTCCATTGTGTGTGTGCATGTGTGTGTCCTTGTGTG
TACTTGAAATAGTTTCTATGGAGTGAAAAAGTTATGTAATCCAAA
TAAAATTTGACTTGCCTTTTGCATAAAGGTCTGAACTAATGAAAT
GATGTATCAAAAAGAAAAAACAATGCTGACTCTAAAATATCAAAG
TCTTTTCTGTATAATTATTGAGGTTATTTTTGAGGGGTGGACCCA
ATTTTTTTTCCCTTAAGGGTGCTCATCACATGGTAGCTGATCACA
ATATCTCTTCTCCCTCTAATATTCTGTCTCATACTTACTTCTCGT
TTCACTCCGCTCTGCCTTCTCTGAACAAGAACCTCTAATTTCCAT
CTTCCAGGTTGTTTTCTGCAGAAAGTATGTAGATGCTCCTTCTTA
CATT

[1143] In some embodiments, the intronic domain that promotes trans-splicing primarily in the heart comprises or consists of sequences from the gene ABCA6. In some embodiments, the sequences from gene ABCA6 comprise or consist of:

(SEQ ID NO: 1084)
TCTGCCTTCTAGGTTCAAGCGATTTTTCTGCCTCAGCCTCCCGAG
TAGCTGGGACTACAGGCATGCACCACCATGCCTGGCTAATTTTTT
TGCATTTTTAGTAGAGACGGGTTTCACCATGTTGGTCGGGCTGGT
CTGGAACTCTTGACCTCAAATGATCTGCCCACCTCAGCCTCCCAA
AGTGCTGAAATTACAGGCATGAGCCACCGTGCCTGGCCTTGGCAT
CCTTTCTATTGGTTGGTGCCTATACCAGTGTTCAGCATCTATCAT
CTCTGTATGCATATATGGTAAAGGTAACGAAGATGAATGGCAATT
ATAAAGAAGGAGAATTGCGATTGAAAAAGGATATGCAATGAGCTT
CTGCTGTAGGATTAACAGTATAGTTATTAATCTAGAAGGTACAAG
GGTAGTCATTACATTGTTCTTTAGATGCTTTTGTATATATTAAAT
ATTTTGTAAATAAGTTAACATAATTTATATAACTTTTTGTCTTTA
TTTA

[1144] In some embodiments, the intronic domain that promotes trans-splicing primarily in the heart comprises or consists of sequences from the gene AFMID. In some embodiments, the sequences from gene AFMID comprise or consist of:

(SEQ ID NO: 1085)
GCTTGGGAGGCTGAGGCAGGAGGATCGCTTGAGCCCAGGAGGTCG
AGGCTACAGTGATCCATGATCGCACCATTGCACTCCAGCCTGGGC
GACAGAGCGAGGCCCTATCGCTTAGAAAACAAAAAGTTACATGAA
GTTCCCCCAAGGTCCCGTAGCTAGCATGTGATGTGGCAGGGAGAG
AGCCTGTCCGCTTCACTCTCTCACATGGGACCAGAAAGGGGTGAT
GCTGTGCGTGGACAGGACATCTGGCAAGTGGTGTGTCCAGGACAC
AGGAAGCAGCGTAGTGGCCAAGCTGCCTCCAGCTGTCACATCTGT
GTGTCTCTGCAGTAAGGATGAGTCTGCCTTCATGGTCCACCCGCT
GACGGCACAGGGAGTGGCCGTGGTAATAGTGGCTTACGGCATCGC
CCCCAAAGGTAATAGGAGTGGTTGCTGCAGGTCCGAGGGCCGGTG
GGCTTTAGGAGGAAGTGCATCCCTGACCCAGCTCATGCTCTCTGT
GCAG

[1145] In some embodiments, the intronic domain that promotes trans-splicing primarily in the heart comprises or consists of sequences from the gene AFMID. In some embodiments, the sequences from gene AFMID comprise or consist of:

(SEQ ID NO: 1086)
TGGGTGTTGCCAGTAGATTTTCTTCCTGTTGGACCTCAGTGGGTG
GGAGGACAGTGCAATCAGTACCTAGGATACAGCCAAGCTGCCCCT
CTGGCCTGTGGAGCAGAAAGCAAATTGGGACTCTTCGAAGGGGGC
CTGATGTTGTGGGGAAACTGCGTGCAAATCCAGCTCTCTGCTCTG
ACCCCTCCCAGGGGAATTTACCTGTGTGGACACTCAGCCGGGGCC
CACCTGGCTGCCATGATGCTCCTGGCCGACTGGACCAAGCATGGG
GTCACGCCCAACCTCAGAGGTTTCCATGGGAGCTACAGCCTGGCT
GGGCAACCTTCATCTCCCCATGAGCCTTGGGGTTTGGGCCAACTG
CTTGAAATCCTCCCGGCCATGAGTGGCTTGACCGCAGGGCTTCGA
GCCCTCTGAGCAAGGCCTTCTCTGCCTCCTCTGTGCCCCTTCCCC
TGGTCCTGCCCCTCTGGCGGTGGGGGTGGGCTGGCCCTGCCTTGC
TCCG

[1146] In some embodiments, the intronic domain that promotes trans-splicing primarily in the heart comprises or consists of sequences from the gene TTC39C. In some embodiments, the sequences from gene TTC39C comprise or consist of:

(SEQ ID NO: 1087)
AAGAACTGTTGATCCCAAAAGGGAAAAATTAGACATAGGGTGTGACGTG
TCTAGATACCTCCACCTGCGCTCATGCACACATTCCTGCGCCATAAAGG
ATTGATTTTTTTTTTTTAACCTTGGTGTTTTGTGTTTGAGCTGTGTGCT
AACAGTCAGTGTCAATGTCTGCCTTCTGAGCTGTGGGCGATTCCCATTG
TTGTGAGGTTTCCTCCAACTGGACGTTAAGTTACTGAGAACAGGAATCA
GGGATGCGATTGGTGCGTGTCTTCTGTGGCTACCTGGTCAGCATTCATA
AACGGTGATAATGGATTGAATGCTGCAGTTTCAACCTTCCTGACAACAG
AGGAGAGTGTTACTTTGGGGCATGAACAGTTATTGATCCAGCTGGGCCT
TGGTTAATGAGTCATTTGGCTTACAGTGTTCCCGAGTCACAGGCTGTCC
TGAAGATCACCTGCTGACTCATTGGTGCCCTTGTTTCCCCGAGGCCTCC
TGCAGTGAC

[1147] In some embodiments, the intronic domain that promotes trans-splicing primarily in the heart comprises or consists of sequences from the gene TTC39C. In some embodiments, the sequences from gene TTC39C comprise or consist of:

(SEQ ID NO: 1088)
TATGTGACATTTAGCATTTCTCAATGCCTAAGATTAAACTGATGCTTTG
AATCCTGATCATGCTTTTGAGCTGCTCCTCTTGGGTACTTGTGGCATCG
TGTTGGCAGACCCTGAGTGACATCTTCAGCGGCGGGAAAACGAAATGTA
TTTCACTGGGAGTAAGTAGAGCGGACATTTGAGAGTTTGCTGGGTCCCA
GACAGTGTTATGTGAATGAAAGTGTTGGAAATGTAATCTGGATCCTCAG
GGAATTTCTGAAGTGTCGGGAGAGGAGATTTGATGAGCAGAAGCAATTG
GAGAACAGCATTCTAGGGTATAGAAGCAAACTATCAACTGTATGGTGAA
GAGCTCACTGAGAACTGGGCTAATGGAGCGGCTTCGTGCATTCACTCAG
TAGCGATTGAGAGACTTCTGGGCCAGGGCTGGGCGCACACGGGGATGAA
ATATGGTCCCTTCCCTTTCCACACCTGTGTGGTAACAAGGGGCTAGATT
AGCAAACAA

[1148] In some embodiments, the intronic domain that promotes trans-splicing primarily in the heart comprises or consists of sequences from the gene MOCOS. In some embodiments, the sequences from gene MOCOS comprise or consist of:

(SEQ ID NO: 1089)
GTTCAGTACTGAAGACCTAAACATTTGTCACAAGGGCAGTACCATCCAC
TATTTACACACATTTAAAATTATTAATGTGAGGTCCAGGTTTGCCAGTT
ATAACAAACTTGTTTTCTTAAAAGTGAGTTAGTGGTGCCAGGCGTGGTG
GCTCATGCCTGTAATCCCAGCACTTTGGGAGGCTGAGGCAGGTGGATTA
CTTGAGCCCAGGAGCTCAAGACAAGCCTGGGCAACATGGTGAAACTCCA
TCTCTGCAAAAAATACAAAAATTAGTCAGGCATGGTGGTGAATGCCTGT
CGTCCCAGCTACTTGGGAGGCTGAGGTGAGAGGATCACCTGAGCCCAGG
AGGTTGAGGCTGCAGTGAGCTGTGATCATACCACTGCACTCCAGCCTGG
GTGACAGAGTGAGTGAGACCGTGTCTCAAAAAAAAAAAAAAAAAAAAGA
GTGAATTGAGAATTTACATAAAGCTCATGATTCTCTTGTGTTTCATGAT
TGATTTGAG

[1149] In some embodiments, the intronic domain that promotes trans-splicing primarily in the heart comprises or consists of sequences from the gene MOCOS. In some embodiments, the sequences from gene MOCOS comprise or consist of:

(SEQ ID NO: 1090)
TGGGTTTTCTTTCCATCCTGCTGACTTTATTACAACTCATCCTAGTTCC
AGACGAGAGCAATGTAGTGTGACAAAGTCCATGCACTGTTGAAGAGGCC
ACCAGGCCCTCAGCCACATGCCTTTCCACCTTCATTCACCCTCGTTTTT
CAGTCCTCTTTACTCAGCCAAAAGTGGTAACTTTCAAATGGGAAGAAAG
AGGCCAGTTCTTCTGATGGCAGGTGGGAAACTGTTGGGTCTTTGCCATA
GTAGAATAAGCTGTTCACTTCACTTCCTGGTCCACTAAAATGTCCAGAG
TTGCACTGAGCACTCAGGCATGGTGGTAGGTGGTTATCAGACGGGGTGT
CACAGATGGACAACAGGAACCAAATGTTACTCCCAGAGCAGCACTGTGG
GGAATGGATTCAATCGTTGGGTGTTTGGAAGACGGTGCTGGTTTTTCCT
TGAAAGCACATCTGCATCCCCATTTTTATTTATTTTTTTGAGGTGGGGT
CTCGCTCTT

[1150] In some embodiments, the intronic domain that promotes trans-splicing primarily in the heart comprises or consists of sequences from the gene PET100. In some embodiments, the sequences from gene PET100 comprise or consist of:

(SEQ ID NO: 1091)
CTAATGTCTGCCTCCCATAAGCCGACCCTGCCCTGATGTGGGGCTCTGG
AGGCCTTTGGCTCGTGTCCCATTTGTGACTTTTCCTTACAGAGGGAGCT
GTGGCCACCTGAGAAGGTAAGTGATCTCTTCTTCCTGCCAGAGGGATGG
AGGAGGCTGGATTCTTGTATCCGGGATGGGTTTTAGATGAAAATTTTAG
GCCAGGCGCAGTGGCTCATGCTTGTAATCCCAGGGCATGGGAGGCTGAG
GTGGGTAGATCACTTGAGGTCAGGAGTTCAAAACCAGCCTGGCCAACAT
GGCGAAACCCCATGTCTACAGAAATACAAAACTTAGCCAGGCATGGTGG
CAGGCGCCTATAATTCCAGCTGCTTGGGAGGCTGAGGGAGAAGAATCAC
TTGAACCCAGGAGGTGGAGGTTGCAGTGAGCCCAAGATCACGCCACTGC
ACTCCAGCCTGGGCAATAGAGTGAGACTTTGTCTCAAAAAGAAACATTT
TACTCTCAG

[1151] In some embodiments, the intronic domain that promotes trans-splicing primarily in the heart comprises or consists of sequences from the gene PET100. In some embodiments, the sequences from gene PET100 comprise or consist of:

(SEQ ID NO: 1092)
TAATTGGCAGGGGGCTTCCAGTGAAGACACTGAACCCTGAAGCCGTGGT
CTGGGGCAGGGTGGTGGGAGAGGTGGGCGGGGGGGGGTGGTCCCGGCTC
TGAGGTGTGTGCCCCTCCCCCCTTCCTGTCCCACCCGCTTCTCCACCCC
TAGCTTCAAGAGATAGAGGAATTCAAAGAGAGGTTACGGAAGCGGCGGG
AGGAGAAGCTCCTTCGCGACGCCCAGCAGAACTCCTGAGGCCTCCAAGT
GGGAGTCCTAGCCCCTCCCCTGATGAAATATACATATACTCAGTTCCTT
GTTATTCATTTAAGTGTTTTATTCTTTTATCAGTTTTTGGGGGCCGAGT
GAGACCCAGGATGCCTCAGGCCCTCAGGGGGCTTGTGTCGGGGGCTGGG
GGCTGCTGTTCCGACGGAAGCCGAGAGCGGTCGGGTCCTGAGGGGTGAG
CAGGGGTTGGGGACTGAGGGTCCCAGCTCGTTTCTGTGCTCCGTCCTGT
GGATGAAGA

[1152] In some embodiments, the intronic domain that promotes trans-splicing primarily in the heart comprises or consists of sequences from the gene PRKACA. In some embodiments, the sequences from gene PRKACA comprise or consist of:

(SEQ ID NO: 1093)
GTGAGGCTGAGTCCTGTTACTATAGCAACTTCCTAGGCACACTCTGCCC
CTTAAGTCAGGGAGGGGCTGCAGCGGGGTCTGGGGCACAGGCGAAGAGA
AGAAGGATGTGAACCCCTGGCTGGCCCTGGAAACGCCTCCTGTACAGCC
CCGGGCTGTGCGGCCTGGGGAAGAGAGAGGGGATCGGTGGCCCAGTTCA
GACAAGGGAGGATGGTCCACCCGGCAGGGGGCCAGCTCAGAGAGGGGTG
GTGGAGTGGTCCATCCCAGTGTTGGGGTTCAGCTCAGACTGTAGGATGA
GCCATCCCAGTGTTGGGGTCCAGCTCAGAATGGGGGTCGTTCCAGCCAG
TGTTGGGGTCCAGCTCAGAGTTGTGTCATTTAGGTAAGCCCAGAGCAGG
GAATCCAGGCTCCACTGGAGGAATCAGCCAGCCTCGAGTAGGGGGCCCA
GCCCAGGCTGGGCATTCCTGCCCCAGAATTCCCAGGACAGCCAGATTTC
AAAAGGGCA

[1153] In some embodiments, the intronic domain that promotes trans-splicing primarily in the heart comprises or consists of sequences from the gene PRKACA. In some embodiments, the sequences from gene PRKACA comprise or consist of:

(SEQ ID NO: 1094)
CAGCGGCCCCAGGGGGCAGGCGCCCAGGTCAGACAGCCAAGTGGGGCTC
AGGTCGTGGCTGGCACTGGCTGAAGATACCCCTGGGAGCTGGCCCACAG
GGGAAGGGGCAGAGCTAGTAAAAGGGAGCCCCCGATCCCCAGGACACAA
GCAGATCCTGGCAAAGAGAGAAAAGCACCCCCCAAGAAGACCCTAGATG
GGAAGAACTAGTGCCGTGTAACATCCTATGGATGCCTAAGACGGCCAAA
CACCTTCTGTGCCTTGGCAGTTGTATGGGTGCCCAAGAGGTCTTATCAA
GGCAGCTCTCCCCTTAGCGCAACCGCGTCTACAGAAACTCGGAGGGCCC
TATCTGTCCCTCCTCCACACCCAGTGGCCTCTGGGTTGGGTTTCTCTTC
CTGCTCCCACCCCACGGCTCCCTAGCTCCCCCTGCAGGCAGGGTTCTGG
GGACAGACAGCCGAACAGACACGGCAGGTCTCATGAGCCTTCCCAGCCA
CCGTAGTGC

[1154] In some embodiments, the intronic domain that promotes trans-splicing primarily in the heart comprises or consists of sequences from the gene SLC27A5. In some embodiments, the sequences from gene SLC27A5 comprise or consist of:

(SEQ ID NO: 1095)
GTCCGAGGCAGGGTTTCTCGGGGCGGGGCTGGCGCGGGGCCACGGACGC
TTTCAGATCCTAGAGGGAGTCAGGCTGAAGAGGCGGGACTTTCCTGTCG
TAAGAGGGCGGAACTTGGAGTCAGGACTTCTCACGCGAAGGCGGGGCTT
CTCGATTTTCGAGGGGGCGGGGCTGACTGGGCCTCCTGATCCCCAAAAG
GGGCGGGGCGGGGGCAAGAGGCGGGGCCTCTCCTTCCCGGGGGCGTGGT
CACAAGCGCCGGCTCCCTCCTTGCAGATGGAAGGGCGAGAACGTGTCCA
CGCACGAGGTGGAGGGCGTGTTGTCGCAGGTGGACTTCTTGCAACAGGT
TAACGTGTATGGCGTGTGCGTGCCAGGTGCGGAGGGTTCTCATTTTAAA
CTTCCAACAGCTTTGTGGGTGGAGGGGTCGTTATTCTGATTTTACAGGT
GGGGAAGTGCTAGGGCCCAGAGAGGTTTAGAGACTTGCTGGCTCTCACA
GCCAGTGAG

[1155] In some embodiments, the intronic domain that promotes trans-splicing primarily in the heart comprises or consists of sequences from the gene SLC27A5. In some embodiments, the sequences from gene SLC27A5 comprise or consist of:

(SEQ ID NO: 1096)
TTACCACCATCTGGGGCCTCCGCCTCAGCTTCTCGGCTCTGTCCAGCTC
CCCTGCCTTGATCTCTTGCTCTGATTTACTGGGTCTCTGGGTGTCCATC
TGATTTGTTCTCTTGAGCTTTCTGTGGAAGACGGCATTCCAGCCATTGG
TCCCTTGTCCTGTACCTTCTGTTAGTGTCTTCTCCCAGGGCCTTGCAAG
GTCCTGGTCATATCTATTCTCACTGCCATTTGTCTGTCCGTCTTCCATC
CCTTGTTATCCTTTTCCTGTTTCTCATGGGCTCCCCATACCGCCTTCTC
TATACTTCTCTCTCATTTTCTGTGTCGCTTGTCGCAGTCTCTCAAGGTC
TCTGAATGTCTCTCTCATCTCTGGATCTCCCTGTCTGTGTCTTTGGGTC
TGTCCTTGGCAGGGTGCTGGGTGATGAAGAGTCCACCGTTGTTGAAAAC
CTCCAGCAGGGGGCTTGGCTGGTGGGCTCCAGGGGTTCTTGTTCCTGCT
CCTACCCCA

[1156] In some embodiments, the intronic domain that promotes trans-splicing primarily in the heart comprises or consists of sequences from the gene ACSS2. In some embodiments, the sequences from gene ACSS2 comprise or consist of:

(SEQ ID NO: 1097)
CACTTGATGAGGTCTGCACCTTCTCAGTGATGTCCACTCCCACAGTGTA
GTTGGCAGCTCCTCACTGGAGTTTGAGTCCTCTGGTAGGGTCCACGTCT
CCTTAGTAAAGTCTATATCCTCTGTATCTCTTAGGGGAAATCCATGTCT
CCTCACTAGGGTAAGTGCCCTTCAAAGCCATTCATGTCCTATTAGCAGG
GCCCAGGGCCCTTCAGTCAGATCTGAGAACCCCCAGCAACATCTGTGCT
CCCTTAGTGGAGTCCATGTACTGTCAGTGAAGTGTGTGTCCCTTCGGTG
CAGTGAATATCTCCTTTATGAAAGTATCTGACCCCTTGGTGGGGTCTAT
GTCCACCCCAAGAGGTCTGTACTCCTTCAGTGGGCCCTCAGATTCCCGC
CCTCCTTGGGATTGGGCAGACTCTCGGTCTCCCATAGAGAGATTTTTTT
TCAGCTTAGGGTGTGCAAGGTTTACAGTCAGCTGGGCAAAGTGCAGGGA
AGTAGCTGG

[1157] In some embodiments, the intronic domain that promotes trans-splicing primarily in the heart comprises or consists of sequences from the gene ACSS2. In some embodiments, the sequences from gene ACSS2 comprise or consist of:

(SEQ ID NO: 1098)
TGAGAGATGGAGGAGGGTCCTGCCTGACTTCTTTCTGGGGTGGAGGGGC
TAGAGAGAAGCTAGAGGTAATTAAGCCCAGGTTGTGGTGGTGGTGGTGG
GGGTTTCCCTTGGTGGAGTAAAGAGATTGTGAAGGAAAGAAGAGAATGT
GGGCCAGGTGTGGTGGCTCACGCCTGTAATCCTAGCACTTTGGGAGCCC
AAGGCGGGCAGATCACCTGAGGTCAGGAGTTCAAGACCAGCCTGGACAA
CATGGTGAAATCCCATCTCTACTAAAAATACAAAAATTAGCTGGGTGTG
GTGGTGTGCACCTGTAATTCCAGCTACTCGGGAGGCTGAGGCAGGAGAA
TTGCTTGAATCCAGGAGGCAGAGGTTGCAGTCAGCCGAGATTGTGCCAT
TGCACTCCAGCCTGGGCGACAGAGCGAGAGACTCCATCTCAAAACAAAA
ACAACAACAAAAAAAGAGAATGTGAATGATTTTTCCTATTTGCACAGAC
TTTGATATT

[1158] In some embodiments, the intronic domain that promotes trans-splicing primarily in the heart comprises or consists of sequences from the gene LBP. In some embodiments, the sequences from gene LBP comprise or consist of:

(SEQ ID NO: 1099)
CCAAGGCAGAAAATCGCTTGAGCTCAGGAGTTCAAGACCAGCCTGGGCA
ACGTGGTAAAACCTGTCTCCACAAAAAAATACAAAAATTAGCCAGGCAT
GATGGCACATGCCTGTAGTCTCAGCTACTTCAGGGGCTGAGTTGGGAGG
ATGGCTTCAGGCCAGGCGACAGAGGTTGCAGTGAGCTGAGATTGTGCCA
CTGCACTCCAGCCTGGGTGACAAGGTGAGATCCTGTCCCCCACCCCCCC
GCAAAAGAAAAGAAAAATGTGGATTCTCAAGCCGCTTCCCCAAATCTGC
TGAATGTGATCATGCGATTGGGTGCCGCAGGCACTGGGAAGCCAGACAC
ACCGAATCAGGCTGGATGTGCTGGGACACAGCAGGGCGCCGGGAAGGGG
TGGAGAGGGCTCCCTTTGTGGACTGGCCTGACCAGGGACCAGGGCCTGG
CTTTCCCAGGCACCCGGCCATCCCCAAGTTCAGTGGCAGACTGTGCTTC
TCTCCCCAG

[1159] In some embodiments, the intronic domain that promotes trans-splicing primarily in the heart comprises or consists of sequences from the gene LBP. In some embodiments, the sequences from gene LBP comprise or consist of:

(SEQ ID NO: 1100)
TAAGAAGGTCCAAGCCTCTGGCCTCCCCCGAGCTTGGCGAGGGCTGAAT
GGAAGACCTCACTGACCAATGGCCCTGGACCAGGCCATGGGGGCTGGTT
TAGACGTACTTGGGCCCAAAGCCCAGGGAGGACAAATCATTTGCCCAGG
TCATGGAGCTGTTGTGGGGCACGCTGGGGACAAAGCTCCAAGTCCGTTC
GGTTGGGCAGAAAATGGTCAACTGCTTGACCAAGGGTTAAACAGCAGGG
GCTAAACAGAGACTCCAGCCCCTCCCTCTGCTCCACCTTGCTCAGTGCC
CCACACTGCCCTGCATTCCACCAAGGTCCGAAAGGAAACCATTCCTCAG
GCGCCTGCAAGAGACCAGGCAGGAAAGCTCAGCGAGGGCGTGGGCCAGG
TGGGAACTGGGCGAGCTCATGAGCACCAGCCCTGGATGGGGAGGCAGCA
ACACTGTCAGACTGGCCTGTTAAAAAGGAGTATGTGAAATCTTCAGAGT
GTATCATCT

[1160] In some embodiments, the intronic domain that promotes trans-splicing primarily in the heart comprises or consists of sequences from the gene PABPC1L. In some embodiments, the sequences from gene PABPC1L comprise or consist of:

(SEQ ID NO: 1101)
AATCCCTCCATGCCAAGGTAAGCAGGAGCCTGGGCAGCAGGGAGCCCGA
GGGGGCAGGAGGAGAGCTAACGACAAGGGCTCTCCTAGTGGAGCCAGTG
GATAGCTGTTTGGCCAGATAAAGTGTTTCTTCTTGCTAATACCTGAAGG
CCTGCTGAATCTTAAGAGTGGAAGGGGCCTTAGGTAAGGGTTTGCTACT
TCAGCCCTTCCGTAGACTAATTCTGTGTTGTTCTGTAGGTAGGTCTTTT
GGTACAAGGAAGTGTGTTGTGACTCAGTGTAAGGGTTAAGATTTTTCCA
GCTGTCCAGCAATGTACCTCTGTGTCAAAGGTGACAGACAGGGCCATGG
GATCTTGCAAGCAGTGGTGGATGGGAGGGTTCCACAGAAACCCTGTGGA
TGGAGGAGGATCCTGTATCCAGGATGGTGAGCGAGGGGGAGATCAAGGC
TCTTCTGTGACCTGCTAAGATAGCTGCACTAAGCCCCCCCGCCACTCAT
GTCTCACAG

[1161] In some embodiments, the intronic domain that promotes trans-splicing primarily in the heart comprises or consists of sequences from the gene PABPC1L. In some embodiments, the sequences from gene PABPC1L comprise or consist of:

(SEQ ID NO: 1102)
TGGGTGGAATGGTGACAGAAGCAGCTGAGCCCGGGAGAAGCTGTA
AGGAAATAGGCAGGGACTGACTTTCACAAACACTGAGAATTGCGC
CGTGTTCCTGGCTTTCTCTGAAGCACCAAAGAGTTTGGAGGAAGT
TGTGAGAATCAGAGGAGATGATTAACTGTGATCGGAATGGGGGGT
GGTGGAGGGTGAAGGAGGTGCCCTCTTGCCAGCTGCCCTGCCTGG
CTTCATGCAGAATAGTTTGGGCTTTCCCAGGGCCCTGCCTGGCTC
CATTCTGCCTGCCTGAAGGCCTGGCCAGGATGTAACCACCTTCTT
TATTGAAGACTGGGTGTCTGCCATACTTTAAAAACACTTATTTTT
ACCTTTTTGTCCTCAGAAAAGGAAATCCTCGCTTCCATGGCTGCC
AAAAGGACAGTGTTTCTGGCTCTCAGCCCTAAGGCCCTGCAAACT
CTAACTTATTTCCCAATTAGTCTGTATCTATACTTGGGCTCTGTA
TGTG

[1162] In some embodiments, the intronic domain that promotes trans-splicing primarily in the heart comprises or consists of sequences from the gene UBE2V1. In some embodiments, the sequences from gene UBE2V1 comprise or consist of:

(SEQ ID NO: 1103)
GTATGCTTGCAGGTTTTGCTGTTTCCTTTCAAATACCATATGTAG
TACTATTTAATATTTTTCTTGTAATCAACTGACTCTTTTGCTTAC
ATTTATTTTAAAGGAAACTTTTACCATTATTATAAATGGGAAGTT
AGTATATTACTTACCCTAAATAAGTTATTCTTAAACATAAATACG
TGACTGTAAAACGAAGTGTTCAATCACATACCACCGAAAGTCCTC
TAACATACCACTACCAACTCTGTCCTTCAGTTGCTTGGACCAAAA
ACCTGGGAGCTGTAGTTGACTCTTGTCTCTCACACCTCACAGGCA
ACCTGATAGCAAATCTCCACAGCTCAGACCTCTGAAATGCCTAGA
ATTACGCCACTCCTCACTACTTTCCTGCTATCACCCTGGTCCAAA
CGGGTATTATCTTTTGCTAGGATTATTGCAGTAGCCTCCTAGCTG
CTTCTGCCCTTGCTCCCTTCACTCTCATCCTCACACAGCAGTCTG
AGGG

[1163] In some embodiments, the intronic domain that promotes trans-splicing primarily in the heart comprises or consists of sequences from the gene UBE2V1. In some embodiments, the sequences from gene UBE2V1 comprise or consist of:

(SEQ ID NO: 1104)
AACAGCTGTTAACATCTTGTTCTGTATCCTTACCAACTCTATAAA
GCTCCTTAAGATGTCACTTATCATCTATATGAGTTTGCTAGTGCT
GTCATAACAAAATACCATAGACTGGGTGGGGCTTAAACAACAAAT
TTCTCACAGCTCTAGAGACCAGAAGCCCAAGATCAAGGTGTCAGC
AGGTTTTGTCACATTCTGAGGTACTGGGAGTTAGGACTTAAGTAT
ATAAATTTGAGGGGAACACAGTTCAGCCCAGCCCATAGCACGATC
TGTGAACAAGTACCTCAGTCATCAGCCTTCCTATCAATATGATTC
TTTTGATGTTCATTTTTATTAGTGCAGGCTTGTAAATTAACCAGT
AGTAATGTAGTGACTTTTCCCCCGCTAGCCTAATTAGGATTATTA
AAGATTTAGATTGAACCCTTTCTGAACAATAGTTGTGTTGTCTGG
CTTTTTGCCTATAATGTCACCACTATCTTTCAGTTTTATGTTTGC
TACA

Intronic Domains that Promote Trans-Splicing Primarily in Muscle Tissue

[1164] In some embodiments of the compositions of the disclosure, there may be an intronic domain that promotes trans-splicing primarily in muscle tissue.

[1165] In some embodiments of the compositions of the disclosure, the intronic domain is derived or isolated from human genes that feature exons that are primarily included in muscle tissue during the process of RNA splicing.

[1166] In some embodiments, the intronic domain that promotes trans-splicing primarily in the muscle comprises or consists of sequences from the gene CDK11B. In some embodiments, the sequences from gene CDK11B comprise or consist of:

(SEQ ID NO: 1105)
GTAAGAACCTCCCTGGAGACAGAGCCCCCTCCTTGTCTGTCTCCG
AGTGCAGCAGCCCTCTCCTAAGACAGCCGGTCCTGCGCAGCGTGG
GGCACGCCAGGGTCTGGGAGGCCGCCTGATTCGTTGGCCGCTCCA
GGCTGTGCCGGTGGGGCCCGCATTCCTCAGCGAGGCACAGTGCTG
ACCAAGGGCGTCCTGAGTGCCCAGCAGGGCCGAGGAGCTGGGAAG
CCCAGGACCAGTTCCCCACAGGGGAGGCCCGTCAGATGGTGGCTC
CGGGCCTGTCCCTGCAGAGCAGAGGCCTGGCCCAGCCTCCGACAG
GCAGTGAGGTTATGTCCTCAGCCTGGTGGACGTGGATGTGGGCTT
GTCCCCCACATGACACCCGACGCCTCCTCCCAGCTCAGCATCCGG
GCTCTGTCTCAGCCGAGCCTGCCAGCACTCTTAGGCCTCGGTGCC
CTGTGTCCAGGGGACGAGAGCCCAGCGCCAGCACCTCCCAGCGGG
ACAC

[1167] In some embodiments, the intronic domain that promotes trans-splicing primarily in the muscle comprises or consists of sequences from the gene CDK11B. In some embodiments, the sequences from gene CDK11B comprise or consist of:

(SEQ ID NO: 1106)
TTAGAAACCGCAGAGAAGTAGCTGGCGGGCGGGGGAGTTGAAACT
CCCTTCTATCTAGGACTCTCTCGGGACACCTCCACATCGATTCTT
TTTGTTTGTTTTTTTGAGATGGAATCTTGATCTGTTGCCCAGGCT
GGAGTGCAGTGGCATGATCTCGGCTCACTGCAACCTCTGCCTCCC
GGGTTCAAGTGATCCTCCCGCCTCAGCCTCCCAAGTAGCTGGGAG
TACAGGTGTGCGCCAGCACGCCCGGATAATTTTTTTATTTTTAGT
CGAGACGGGGTTTCACCACGTTGGCCAGGATGGTCTCGAACTCCT
GACCTCAGGTGATCCACCCGCCTCGGCCTCCCAAAGCGCTGGGAT
TACAGGCGTGAGCCACCGCGCCCGGCCTGCATATCCATTCTTGGG
AACACTTGTTGCTTAGCTGAAGCGGAGCCCGCATCCTGCCTGTGG
CAGCACTCGCCCCGGTGCTGGTCTGAGCAGACGCCTCCTTTCTCT
TGCA

[1168] In some embodiments, the intronic domain that promotes trans-splicing primarily in the muscle comprises or consists of sequences from the gene HP1BP3. In some embodiments, the sequences from gene HP1BP3 comprise or consist of:

(SEQ ID NO: 1107)
GTGAGTGTGCGGAGCGCCGAGGCTCGCGTTCCGCCGCTGCTTCCG
TCGCCGGGGCGGGCGCCGCGGTGTCCCTGCCGAGCGTGAGCCCCG
AACTGTCACCGCGCCGAGCCCCAGCCTCATCCGTCGGTGTCCGCG
GTCCGAGCTTTCCCCGCCTCGCTGGCGGCCCGCGCTCTCCCCCGC
CGTGCGCGTTCGCCGCTGTGGCCTGTAGCTACCTCGCCTCGCTGC
TTTGTCTCCGCTGCTCTTGCCGTCCTTCCCGCGGCCTTCTGCGGG
CGGGGCTGTCGGCTGTCGCTTTGCTGCTCCGCGACGGCGGCCTTG
AGTCTCGCTCCCCCGGTGGGAAACGTAGAACTGGTTACTCGCCAC
CTTAGGCGGTGGGGTTTGAATGAGAGCGGTGCCTCGGTAGGTCGT
CAGAAAGTTACAGTCGCCCATCTGAGCGTTTGTAAGAGATGGAGG
CAGGAGTGGTGAGGTGAGAGCCCCAGATCTGAGGGTTGGTACTGC
ATTA

[1169] In some embodiments, the intronic domain that promotes trans-splicing primarily in the muscle comprises or consists of sequences from the gene HP1BP3. In some embodiments, the sequences from gene HP1BP3 comprise or consist of:

(SEQ ID NO: 1108)
CAGGACCGAACAGGCGGCCGGGGAGTGGGCGCGGGCTCGCTGGGC
CCCGAAGGCGAGTGGCGGAGGCCGCTCGCCCGGGGCGCCGACGCC
GCTCCCAGAGAGGAGGGGGCGGGGCGCCCGGGTCCCCGGAGGTGG
CGCCTTTTGTCTGCCTTACCCGGCCGCTCCGCCCCGCTCCCTTCC
TCTCTCCTGCGACCTAGCCCCCTGCCCTTTTGGTGGACTCCTCCT
CAGGGGCCCTCCGGCGCGCGCGCTCCCGCCCTTGTTTTGTTTGGA
TTTGGGGGAGGAGGGGGAGCTCTTCTCTGGCCGTGCGACCCTGCG
TCCCAGCGCGCCTGCGTCGGCGTCCTCTGCCCGCCCCGATTGGCT
GAGGGCTGCGCATGCTCCGAGGCCCGCCGCGGTCCGGCGTCCGCC
CGCGCCCTCCCCTCACCCCACTCCCTCAGCGGTTTTCGGAGCCGG
TTCGAAAGATGCCGGCGGCGGTGACTGGCTGCGGCGGGCCCGCCC
CCCG

[1170] In some embodiments, the intronic domain that promotes trans-splicing primarily in the muscle comprises or consists of sequences from the gene FNDC5. In some embodiments, the sequences from gene FNDC5 comprise or consist of:

(SEQ ID NO: 1109)
TCCCTCAGCCCCAGTGAACGTCACCGTCAGGCACCTCAAGGCCAAC
TCTGCAGTGGTGAGCTGGGATGTTCTGGAGGATGAGGTTGTCATC
GGATTTGCCATCTCCCAGCAGGTAATGCTCCACTGTCCTTAGGAG
GGAAGGACACATCAAGACAGTAGTGGCAGATGGGGGTAGGAGTGT
GGCAGTGGTGGTGATGGAGAAATAGAAAGGAAATAGGAACTTGGG
GCAAGGGAGATGAACAGCAATTTGGACATATGTCTGAAAATTGGG
GCCCCATTCAGACATATGTCTGAAAATTCTCTAGAAGAGAATCAG
TCAGTGAGGGAGGGTTTGGGAACTTTCAAGTGGAACACAGAAATT
AAGGTTTTGATCTCAGAGACATCTGCATTTAGGACCTAGCTCCAG
TGCTTACTAGATGTGTGGCCTTGGGCAACTTCCCCAACCTCTCTG
AACCTGTTTCCTTCCCTGTAAAATGGAGATATTGATAGCGGAGGT
GAT

[1171] In some embodiments, the intronic domain that promotes trans-splicing primarily in the muscle comprises or consists of sequences from the gene FNDC5. In some embodiments, the sequences from gene FNDC5 comprise or consist of:

(SEQ ID NO: 1110)
TCCCAGTCCAGGGCTCACCCCAGCCTGACACTTCTCGATCTCTGG
GTCTTTCTCCTTCGCGCAAGGTCACTCATTGGACAGGGCAGTATT
GTCAAAAGAGCACTGGACTGGGGAGTCCTTTTGTCTGCTTTTCAT
CAGCTAACCTTCAGTTTCTGTCCACCTATGTCCCCTACATAACTC
TCTCCACAACTCTAACCACCCATCCCTTAGATAGGGCCCCGGCCC
AGGCCCATCACTTTGAGCCTTGGACCCCTCATGGGGCCGGCCTGT
GGCCAGCAGGGGCTTCCGTCCCAGTCATGAGGAGCCTGGGGCCTC
TTGGGCTTGGTTCTTCAACCCACTGAAGAGCTGAGAGCCATGTCA
CTGGACCCCACTTGAGGCCTTAGTTTCTTCCTTCCCCTCCTGCAT
GGCCTTCCCCAGGTTTCCCCTTCTTACTTATGAGACAGTGGGTCT
GGGCCTCACAATAGGGGATGCTCAGGCTTAGGTGCCTCCCCGTCC
CCCA

[1172] In some embodiments, the intronic domain that promotes trans-splicing primarily in the muscle comprises or consists of sequences from the gene RAP1A. In some embodiments, the sequences from gene RAP1A comprise or consist of:

(SEQ ID NO: 1111)
TGCGCGGCTCCTTTAAGCGGACTCCGGAACGCCGTGGGGAAGGCG
GGGCCGAAGCCCAGCCATCGCCAACTTGGAGGGGCGGGGCAGAAC
CAGGGGGCGGGGCCTGCGTGGTGCGTGCGTGCGCGTTCTGGAGGA
GGCGCCGCCGCCGCTCCCGAGGCCCCTGCCGCCGCCGCTCCCGCT
GCTGTCGCCGCGCAGAGCCGGAGCAGGAGCCACGGCCGAGAGGAG
GGAGGAGGAGGAGGAGGAGGTGGAGGAGGTGGAGGAGGTGGAGGA
GGCGCCGGACCGGGGGGGTGAGTAAGGGGCGGGGAGCTCCAGACG
GCCCCAGAGGGAGCGGGGGGCGCGGGTCGGCCGAGCCGAGGGTGA
GGCGGCTCATGTCGCCGGTCAGTCGCCTGGCTCCCCCTTCCTCCT
CCGCGTTCCATCGGTGTCGGGGCGGCGGCCCGGGGGCCTGGCCGG
CGGGAGGGGCCGGAGATCTGGGAGGCCCGGCCGCCGCCAGGGCCA
GAGC

[1173] In some embodiments, the intronic domain that promotes trans-splicing primarily in the muscle comprises or consists of sequences from the gene RAP1A. In some embodiments, the sequences from gene RAP1A comprise or consist of:

(SEQ ID NO: 1112)
TTGGACATCGCTGCCTTCCTCCTCTTGCATGTCCCCTGTCTAGGG
TCAGAGCTTCCTTCAAACCCAGCTCTCCCTTTTGGGCCCGCGGGG
GCGGGGGGGAGGGACACACGGGGAACGGGGTTGGAGGGTTGGGTG
AATTCTCTGTCCTCTGCTGTAGGAGTGCGGGTAGACTGGAGCATT
GCTGTCTCCGGGCTCACTTCTGTCAGGGTTCAGGGTCTCCCTTTC
CTTCCTTTATTCCCCCAGTTAATAGGGCTGACATCTACATCCCAC
TCCACCTTCCAGCCCCTTTCCCGCCTTCTTTACCCTCATGTCTTC
CGTAGCTTACCATGTGTTCGCCTTTTCAGTGTTACTTTTCATGGG
TCTCTGCTTCTTCCCTGAATTTTGTTAGGGAAGAGGTCACGGTGT
GATTCTTGTTATCCTTCAAACTAGCGGCTTGGTAAGAGTATCTCT
TGCCCCCTTAATCAGGAAGTTAAGGACGGTGTCTTCAGCCGAGTT
GTGT

[1174] In some embodiments, the intronic domain that promotes trans-splicing primarily in the muscle comprises or consists of sequences from the gene TMOD4. In some embodiments, the sequences from gene TMOD4 comprise or consist of:

(SEQ ID NO: 1113)
GTGAGTGTGTTTGGGGAGCATGGTCCCCAGGGCTCTGGGCAGGCA
GTCCTAGTGTCTGGGAGAAGGTAGAAAAGGGTGAAATTGATGATT
CTGGGAGAGGACATGCTGCATGAGTGATAAGAAAACCTGTGGAGT
GCCAGGTGAGGTGGCTCATGCCTGTAATCCCAGCATTTAGGGAGG
CCGAGGCAGGTGGATCACCTGAGGTCAGGAGTTCAAGACCAGCCT
GGCCAACATAGTGAAACCTTGTCTCTACTAAAACTACAAAAATTA
GCTGGTTGCATGCCTGTAATCCCAGATATTATACTTGGGAAGCAG
AGGCACAAGAATTTCTTGAACCCGGGAGGTCAAGGCTGCTGTGAG
TTGAGATTGTGCCACTGCATTCCAGCCTAGGTGGATAGAGCGAGA
CTCCATCTCAAAAAAAAAAAAAAAGAAAAGAAAAGAAAACCAATG
GGGAGGAGATTATGGGGAACATGTTGGGGTTCCCTTCCTGCCCTC
ATTC

[1175] In some embodiments, the intronic domain that promotes trans-splicing primarily in the muscle comprises or consists of sequences from the gene TMOD4. In some embodiments, the sequences from gene TMOD4 comprise or consist of:

(SEQ ID NO: 1114)
AGAGCGAGACTCCGTCTCAAAAAACAAAAAACAAAAACAAAAACA
ACAACAAAAAAAATTAGCCAGGCATGGCAGCATGCACCTGTAATC
CCAGTTACTTGGGAGGCTGAGGCAGAAGAATTGCTTGAACCCGGG
AGGTGGAGGTGGCAGTGAGCCAAGATCGCACCACTGCACTCCAGC
CTGGGGGACAGAGTGAGACTCCGTCTCGGGGGGAAAAAAAGTGGA
ACCATTCTGGCTGAAAGAGGAGAGTCTCTACAGACTCCTTTATCC
TCTAGTGGCTCATAAGGGACCTTCCCTTAGCCCTTTCTCAATGTT
TTAGAAACTACTGCCTTAAGAAGTTTATGGAAAGGACCCCTGGGG
CTGAAAGAGGGTGGGAAACTTCTTTGGCAAAGTGTAAGTGGTCAG
GCTTTACAAATGCAACAGATTCAGAAATAGGTAGGAGGGAGGCTT
GGAACAGGTTCCTTCTCATTCCCTGTGACTCCTCTTCTTACCCTC
TCCA

[1176] In some embodiments, the intronic domain that promotes trans-splicing primarily in the muscle comprises or consists of sequences from the gene DAP3. In some embodiments, the sequences from gene DAP3 comprise or consist of:

(SEQ ID NO: 1115)
GTTTTTGTTTTTTTTTTTTTTTTTTTGAGACAGAGTCTCACTCTG
TCACCTGGGCTAGCGTACAGTGGTGTGATATCAGCTCACTGCAAC
CTCTGGATGCAAGCAATCCTCCTGCCTTAGCCTCCAGAGTAGCTG
GGACTACAGGTGCATATCACCACTCCTGACTAATTTTTTTTTTTT
TTTTTTTTTGAGACACAGTCTTGCTCTGTCGCCCAGGCTGGAGTG
CAGTGGCATGATCTCAGCTCACTGTAAGCTCCGCCTCCCAGTTTC
ATGCCATTCTCCTGCCTCAGCCTCCCAAGTAGCTGGGACTACAGG
CGCCCACCACCACACCTAGCTATTTTTTTGCATTTTTAGTAGAGA
CGGGTTTTCACCGTGTTAGCCAGGACCGTCTCGATCTGACCTCGT
GATCTGCCCGCCTCGGCCTCCCAAAGTGCTGGGATTACAGGCGTG
AGCCACTGCGCGTGGCCTCCGACTAATTTTTTAAAATATTTTTTG
GTAG

[1177] In some embodiments, the intronic domain that promotes trans-splicing primarily in the muscle comprises or consists of sequences from the gene DAP3. In some embodiments, the sequences from gene DAP3 comprise or consist of:

(SEQ ID NO: 1116)
TATGAGCCATTACACCTGGCCTATTTTCTTTTTTTTTTTTGAGGT
GGTCTCACTCTGTCATCCATGCTGGAATGTAGTGCATCTCAGCTC
ACTGTGACCTCCACCTCCTCCCAAGCTCAAGTGATCCTCCTGCCT
CGGCCTTCCGAGGAGCTGGGACTACAGGCATGCACTACCATGCCC
TGCTAATTTTTATATTTTTTGTAAAGACAGGGTCTCACTTTGTTG
CTGAGGCCAGTCTTGAACTCCTGGGCTCAAGCAATCCACCCACCT
CAGCCCCGAGAAGTGTTCCTCCCAAAGTGTGGGGATTGTACATGT
GAGCCACTGTGTCCCGCCTGACTTTTTTATTTTCCCAGTATGATG
ATTGTGAATGGTATCTGGTTTTCATCATTTTAATTAGCATTTCCC
TGATTTGTAATGAGGTTCAAAAATCTTTTCATGGGTTCACTAGCC
TTTTGTGTTTCGTTTTCTGTGAAATGCCTGTTCATGCCTTTTGCT
CATT

[1178] In some embodiments, the intronic domain that promotes trans-splicing primarily in the muscle comprises or consists of sequences from the gene TNNI1. In some embodiments, the sequences from gene TNNI1 comprise or consist of:

(SEQ ID NO: 1117)
GTAAGCGTCTGCAGCCCAGAACTTCAGATGTAGGTTGATCCCAGG
CAGAGAACCTGGGGCTTTTGTTTAAGGAGAAAGCGAGGTCTTGGA
GCTGGAGAAAACCATTTCTTGCCTGTGCAGTTGGTTTGTTGGTAG
AACATTCCTAAAATACTCCCACAGCATTTTGTCCCACAGAATGGC
ATCTCTCCTGCAAAACTGTTGTGAGAGGTGAAACTTTTTCCTGGC
CATTTGGAGGCTGTGAGCAAGGAGCAGAATCTTCCGTGAGGTTCC
TTAGGAGCCCCAGGGCAGAGCCTAAGGGATGATGTTTTCACACAG
GATGCCCAGCAGAGTGTGGGAGGGAGAGCGCACCCAGGGGAAGGG
GTGGCCCTGGGATCAGAGAGCCAGGGTGAGTGCTCAAAGTCAGCA
ATGCCTGCAGCGGAAGAGAAGGAGGGTGCCTGACGCGCAGGACTC
CCAGGGAGCCTAGAAGGCAGGGCCAGAGCTCCCTGCTGGCCAAGG
AAAC

[1179] In some embodiments, the intronic domain that promotes trans-splicing primarily in the muscle comprises or consists of sequences from the gene TNNI1. In some embodiments, the sequences from gene TNNI1 comprise or consist of:

(SEQ ID NO: 1118)
CTCTTGGGCTTTTGGGGCATGGGTTCAGGGGCCTCATTTCCATAT
TGCCTTATAAGAGATGCAGGGTTAGCCCAATGGTCCTCTTCCCCC
AGCTGCTACTTGCCCCTCTGGGCCTTCACTGTGGCCCTTTGCTCT
CCCTCATTCCCCCTCCCAGTCCCATCTCTGCTCAGTCCCCACACC
TGGTCTGGCTGCTCATTCTTTCCCTTTCTGCAGCTCGAGTCTCCC
CAGGTGGGTGCTGGTTTCACTCAGTTGGTGGCACCTATGTGCACA
GAATTTGCCTCTGCTCCTGAGCCACAAATTCACATGGCTTTCCGC
CTATGTGCCTGTTGTGTGCATTGCAGCACGCATCTGCCCTGTGAG
GTGTGTGTGTGTGTGTGTGTGTGTGTGTGTGTGTGTGTGTGTGTG
AAGGGTGGGAGGGAGGAGGGGCAGCAGGAGGGGGCAGTGGGTCTG
TTCTATTTTTACCAGCCAGTTGCTGCTGGACACAGTTTTCATAGC
CTCC

[1180] In some embodiments, the intronic domain that promotes trans-splicing primarily in the muscle comprises or consists of sequences from the gene OBSCN. In some embodiments, the sequences from gene OBSCN comprise or consist of:

(SEQ ID NO: 1119)
TCCCAAGGGCCCACCTCTTCATCCATAGGGGGTTAGTATTTCAGC
ATATGGTCTTTGGGGGGCATCTCAACATTTAGTCCATAAGAGAGG
GTAAGTCCAGCCTCAGTCACTCCATCTTGACTAGAAACACTAGTC
CTAGCTTCTGGTTTTGAGGCCTGTATCTTTTCATCCCATTATTCC
CTAGTAGGATGGAACTGGAAGGTTCTACCACTATCACTGTTTCTT
CTGAGGCCCCTGGATCATTCGGTATTAGTTTGTTGTGTCAAAGAG
GCTTGTAGTTAGTTATAGGCCTTGAAGAATGGGGCTAGTAATAGC
CTGAGGTGGAGAGGCTACAATGTTGCTGTTTCCCCTGTGACTTCC
TAGCTCCCAAGTCTAAGTGGCTCCCGGGCAAGGCTCTGTAGTCAG
GACCTCTGAGGGCCGAGGCCATCCTGGTGCGGTAGCTTATGCTGG
GGCAGATGGGATGGCAGACCTTGCTCCAGCTCCCCTCTTCCTTCC
CCAG

[1181] In some embodiments, the intronic domain that promotes trans-splicing primarily in the muscle comprises or consists of sequences from the gene OBSCN. In some embodiments, the sequences from gene OBSCN comprise or consist of:

(SEQ ID NO: 1120)
TAGGGGCTGCCAGAGGTGGGCTGTGCCCCATGGACTGACGTCGCA
GGGCCTCTCGGGGAGTGATGCTGCTGGGTGAGGGCAGGGCTTGGT
CTGACAGCATCCAATCCTGGAGCCTTCCTCCAGGCCCTGGCGGTC
TCTGTCCACTCAGTCAGCAAACAGGGGCTTCCAGCGTCATCCATG
CCCAAGCCCCTCAGCACCCCTCCCGCCCTGCTCCCCTCGATGCCC
TGCTTTATGGCTGACCCCTTTTCTGTTCTGCCAGCCGGGAGCAGG
AGGGAACAGAGTCCACCACTGATGAGGGCCAGCTGCCCCAGGTGG
TGGAGGAGCTGAGAGACCTCCAGGTGGCCCCTGGCACACGCCTGG
CCAAGTTCCAGCTCAAGGTGAAAGGTGAGAAGGAGAGGGAGTGGG
GACACAGCCATGGCAGGATGGAGGCCAAGGAGCCATACCCCATCA
GCCACAATTGAAAGGAGACCCCAGCAGCGGGGTCAGGCAGTCACT
CATC

[1182] In some embodiments, the intronic domain that promotes trans-splicing primarily in the muscle comprises or consists of sequences from the gene KANSL3. In some embodiments, the sequences from gene KANSL3 comprise or consist of:

(SEQ ID NO: 1121)
GTGAGAGCAGCGTTGGCTTCGAGGGGAGTGGCGGGCCGTGGGGAT
CGCGGCCGTGGTTGGGACGGCCGGGGGTCTCGGCGAGGGCTTCAG
GGCTCCCGGGGCATGCGGGGGCCCGGGCTAGGGCCGGCTGCCGGT
GCTGGTCGGGCGGGGCGGGTCGGGCCGGGGGCGGGCTGGCAGGGG
CCGCGTCTGGGCCTCCGTGACGCGGACGCCGAGCCCTGCCCCAGG
GAGCGGGAGGCGGGAGGCGGGGGCCAGGCGGCTCCTCCTCGTCGC
GAACTCTGGATGACCTTGGCCAAATCGCTTCAGTTCCCCGAGCTG
GCGACTTCGTCTGTAAAATGCGAGTCATAGCCCTGTCTCCTAGAT
GGGCCGTGTGGAGGCTCAGTGGCGGGAACGCCTGCGGGGCAGCCG
GGGTCCTGGGCGGTTTGCTAGGGACGCCTCACTGGGGGTGAGGGT
GAAAGGGCTTCCACGGGGATCATTTTGTCACAGGCTTTGTTGGGG
GGGC

[1183] In some embodiments, the intronic domain that promotes trans-splicing primarily in the muscle comprises or consists of sequences from the gene KANSL3. In some embodiments, the sequences from gene KANSL3 comprise or consist of:

(SEQ ID NO: 1122)
CCTCCCGGGTAGCTGGGACTACAGGCATACACCACTATCACACAC
ACCTAATTTCTAAAATTTTTTGTAGATACGGGGGTCTCATCATAT
TGGCCAGGCTCATCTCAAACTCCTGAGCTCAAGAGGTCCTCCCGC
CTAGGCCTCCCAAAGCGCTGGGATTACAGGCGTGAGCCACATTAG
GTAAATTCTTAATGAGTAAATTCAGGTGGCTGCCCTGGTGGAGGT
GGACCGTTGGGTGCTCGACCGCCCAGAGGGCACAAAGGACCAACA
CGGTGGGGGTGGCGAGAACTGGGGCCGTAGAAGCCAGCCTAGTCC
TCCGCCCTCGCTTTCCCTACTGAATATGCGCGAGGGGGAAACTCC
AGCCTAGTTGTTGACTTTCTGCTTCGGACATGCTCGCGTGTTCTT
GGCTCTCCTCTTCCGGACAGAGGCGCCGGAGCTTCATCCGTTCCG
GGCTTTGCCGCTCACCGCCTCTCCCTTCCCAGGCCGTAACCCGCT
TCCG

[1184] In some embodiments, the intronic domain that promotes trans-splicing primarily in the muscle comprises or consists of sequences from the gene NEB. In some embodiments, the sequences from gene NEB comprise or consist of:

(SEQ ID NO: 1123)
GTAGTGCCCACTTGGTCTTTTCTTTCCCTCTTAATCCAAATAATT
GCACTAGTGACACTCATTAATGTGTTCCTCCTACCATTTACATCA
CCACCTAACTGTGGGTTTCAAATTGGGTTCTCATGTGCTTGGTAC
TACCACCTAATCTATTACCCATGTTAATTCTTCTAATTTTTTATT
TGAATATTACCTTAGCATTCTATTAACTTCAAGCTTTCATTTGAT
ATTTAATGTTAACTGATCATGCTTATACCCTGCCTGTATTCATAT
TTTTACTTACTAAACTGTGAACCCTTTAAAAATTGGAATTGTTTT
TTATTTTCTTCTTTGCCTGAGAGAATCAATCTGGGCTTTCTTGTC
AATGTTGTTGCTTTTCTTTCATGATATAGAAAGAGTACAGGAAAG
ATCTAGAGGAAAGCATCCGTGGGAAGGGCCTCACTGAAATGGAAG
ATACACCTGACATGCTAAGAGCAAAGAATGCCACTCAAATCCTCA
ATGA

[1185] In some embodiments, the intronic domain that promotes trans-splicing primarily in the muscle comprises or consists of sequences from the gene NEB. In some embodiments, the sequences from gene NEB comprise or consist of:

(SEQ ID NO: 1124)
CCAGCCTGGGCATCATAGCAAGACCCCATATTAAAAAAACAGGTC
ATGATTAGGAAAAAAAGCAAGTTAGCATTTGGTAGCCTTAGGCTC
TCCTTCCACTGCGATTTTTTTCCCCTTGCCTCACTGACTTGTAAT
TCTGAAATAAAGTCTTTTGTCACCTTAAGAAAGGTGTGGGAAAGT
TCAGAAGAGACAACAGAGGATTCAGAGTCCTGATGGTGCATCCAT
CCTTCCACTCTGTGAAGGGCCTGCCCCAGTCACAACATTAGACTG
ATGAGTGAGGGGCCCATCAAAGTGTCTCAGCCTGAATTTCCTTGT
GGCCATTTGCTCCAGACAAAGTATTTCAAGTACAATCATACATGT
TTCAAATGTGTGACCATTAGCAGAACTATGATTAAGAGCCCATAC
ATAGAAAATGCTGTTTTTTTTTTCTTCCTGAGATGGAGAGATATA
TTGTAATAAAGATTTTTTTTTAACTTGTCTTTCCTTCCTACTTAC
ATTA

[1186] In some embodiments, the intronic domain that promotes trans-splicing primarily in the muscle comprises or consists of sequences from the gene SEPT2. In some embodiments, the sequences from gene SEPT2 comprise or consist of:

(SEQ ID NO: 1125)
GGGGGACGCGCCGCTCGTCCCATACTCTCGGGCGGTGGTCGGCTG
GCTCTGGGGTGCCGGCGGGGCGGTGTGGGGGAGGGGCGGCCGAGC
CCAGGCTCTTCGGCACTTATCGTGGGCTCCCCCGTCCCGGGCGGT
CCTAGTGCCGGCGACAGTGGCTCCGACACGGGCAGGCCCGGGCGC
GGGAGTGGGGATTCCGGTGACCCCTTGTTGACCCTGCGGGAATTC
CTCTGCACTGTCGTCGGTGCTGGGCCTCGGGGCGTCGAGTGCGGT
CGAGGTCGGGAGGTTTGGTGCTTGGAGGGAGGATACAGGTTTAGG
CCCGACAAACACTTAGAGCTTGTGTGGCCATCTTGTCTTTCTAAC
GGTGCCATTTCCTCCCTGAGGCGTGGAGGACTGGCCAGCCCCCAA
ACCTCCAAGCCCATCGGCTGGATGCCGTGGATAAGCGAGGGGAGA
GCGACTAGGCCCTGTCTGCGGGTACCTTCGGCGAGGAGAGGCGAC
GAAG

[1187] In some embodiments, the intronic domain that promotes trans-splicing primarily in the muscle comprises or consists of sequences from the gene SEPT2. In some embodiments, the sequences from gene SEPT2 comprise or consist of:

(SEQ ID NO: 1126)
CACGGACAGGCAGCAGGGGGTAGGGTATAGGGTTGGAGGCCGCCG
AGTTGGCCCGGGGATGAGGAGCAAACCTGTGGCTTCCGTGGTCTC
AGTGGAGTCCCAACTGTGACCTGGCCTACTGGCCCAGACAAACCT
GGCTTGCTTTTTTACCTTTTCGGTCTAATTCTTGTCAGTGCCACC
AGACCTTGTCCTCTCTCCACGGAAACACACGAACCAACTACACTG
AACTTCTTGTAGTTCAAACTTCTGCACCTTTGGCCATTGCCCAAA
CTCTTAAATCTGGCTACTTCCCACCTTAACTGCCTTCTCCTTACC
TAGTCTGTGCTTGTGGGATTCCGCCCAAATTAGATTTCCTCCAGA
CAGGCTTAGGTGTTTACCTGATGTTCCAGATGGTATTTGTCCAGT
GGACTATTGGTGCTGTGAGGGCAGGGCACATGTTGTCACCCATAC
TCATTGCCTCGGTTGGTGTCTAGCACCTAGTAGGTTCTCAAATAC
TTTT

[1188] In some embodiments, the intronic domain that promotes trans-splicing primarily in the muscle comprises or consists of sequences from the gene SLC6A6. In some embodiments, the sequences from gene SLC6A6 comprise or consist of:

(SEQ ID NO: 1127)
GTTCCTTGGGACCTCCTTCTGCATTCTAACTCGGGGGTCTGCAAA
CAGTAACAACAATGGTGGTGACAGCAGCCTTGACTTACGGGCTTG
CCATGTAACTGGCACTGGGCTGAATCGCCACTCTTTGAACCTGGG
AAATAGCTCTATGGGGTAGGGCAAAGGAGCCCATTTTATAGATGT
GAAAACTATCTATAAACTGCAGGAGTGATATTTACTTGCCCACTG
TCATTCCAGGGTTGGAATCCAGATCCATCTGCTTCTGAATCCTCT
TAACCCTGATGCTAGGTCGCTGGGAGGTGGGGTGTTTGATTTCTG
GGGCTCCTTGCAGCTCAGTACTGCCTTGAAAGGCACCTTGGATTC
GAGCATAAATGTTCCATTTGCATGTGCAAGGTCCCGTCCCCAGGC
CATCGCCAGGTGGACATAACCCTCGCTGCCTCCTCCAGGAAGCCA
GCTCTGACAGCCCTCCTCTCTTTCCTTGCCACCTCCCTCCCCCTC
ATAG

[1189] In some embodiments, the intronic domain that promotes trans-splicing primarily in the muscle comprises or consists of sequences from the gene SLC6A6. In some embodiments, the sequences from gene SLC6A6 comprise or consist of:

(SEQ ID NO: 1128)
CAAGTGTTGCGCCGGCGGGCCTGGTGGACTTTAGAAATGATGATG
ATGATGTTTAAAGAAAAAGAGAAGTAGGGAGCGTGGCTTCCTTGT
GTTGTGAATTAACTTGCTCCCTGACATATGTGTAACTTAGGGACT
GTATGCTGCTGGGATGCCTGAACAGTGGTACCAGTTTTGTGTCTG
GCTTCGCAATTTTTTCCATCCTGGGCTTCATGGCACAAGAGCAAG
GGGTGGACATTGCTGATGTGGCTGAGTCAGGTACGGTGGTATCGG
TGGCAGTGGTGGTGGGCACTGCCACCTAGTGTGTAAGCCAAGTAC
TGCAGGCATGAAGCCAGACCCCAGGGGGCTTTGAGGGGGGACGAG
CCTGGTTTCTAAAATGGACCCCCCCCCCGCCACCAAGATATCCCC
CAAATTTCAAAGAGTACAAAGCCAAATTTTAAACATTTGTATTGC
AATTTGGCCCTGATGGGTGGCAAAAGCATGGGGGGTGGTTAAGTT
GGGG

[1190] In some embodiments, the intronic domain that promotes trans-splicing primarily in the muscle comprises or consists of sequences from the gene THOC7. In some embodiments, the sequences from gene THOC7 comprise or consist of:

(SEQ ID NO: 1129)
GTGTGCCGGGAGCGTGGTCGGTGGGCTGGGAACACACGTGGGTGG
CCGAGACGGCTAGAAGCGGTGCAAGGGCGGGTGGGACCAGAGGGA
GTCCGGGTTTGTCTAGGGGCGCGGTGAGGACCCAGGAGCCGCGAA
GGGTGGACAGTGGTGCCGGGCTTAGGGCTGGGGGCCTGGAAGGTT
TGTGGAGGTCTGGGAGGGAGTGGGAGCTCCAGGGACGGGGCGGGA
ATTTCGGGACTCGTCTACAAGGGGTGTCAGGATACAGAGCGTGAC
ACCAGGAGGGGTCCTGGGGCATATTGGGAAGCACTCACAGACAGT
GGAGTCGATGGCAATGAGGCCTTGAACTGCGAGTGGATTGTGGGT
GAGAAGGAGGAGCAGGGAATTATTTATAAAAGGAATAGATAGGGA
TGAGGTATCCGGAGGGTGATCAGGAAGTGTACCTGGGAGATTTAC
GGGGGTAAGGAGGAGCCAGTATAGTGATGAGACCGTCTAGGGTAG
ATCA

[1191] In some embodiments, the intronic domain that promotes trans-splicing primarily in the muscle comprises or consists of sequences from the gene THOC7. In some embodiments, the sequences from gene THOC7 comprise or consist of:

(SEQ ID NO: 1130)
GGGGCGGCGGGGCCGCAGTCACCTTCCCGGGGAAGAAGCCGGGAC
CCCGACTGCGGGCGGCCCGCAGCTCCCGCCGCACCCCCGCAGCCC
TGGCGGCGTCCGGGCGAGCTCACCTGGCGGCTGGCTGCGGCCTCC
GGGGCGGCCTCTGGGCGTGGGCCGGGCGGGGGCTGCAAGGGGGGC
GGCGGGAGCCCGGGCTGCAGCCGGGGCCGCCGCCGGCCGCCAAGC
CTCGCCCCAACTCGCGCCGGCCGCGGCCGCCCCCGGGGAGTACCG
GGAGCGCGGGGAGCGCGGGTCCCGCGGCGGCGGCGGCGGCGGCGG
CGGCGCGGCGCGGCGCGGCTCAGGCGTCGGAGCAGGCGGCCGCGG
GCGCCGCCGCCTCCTCCTCCATGGCTGTTTACCCGGCTGCATTGT
GGGAGTTTGACCTCCGCCGCCGCCAACCGCCGCCTCAGCTTGCGC
CGCCGCCGCCGCCGCCGCCGCCGCGCACGCCATGGGAGCCGTGAC
TGAC

[1192] In some embodiments, the intronic domain that promotes trans-splicing primarily in the muscle comprises or consists of sequences from the gene MBNL1. In some embodiments, the sequences from gene MBNL1 comprise or consist of:

(SEQ ID NO: 1131)
AACACGTCAGACTCATTTACAAGAATGCTAGATTGTGCATATGTG
GCATGTTAATAAGTAACCTTTGGTAGAACTATTATGATGGATTCA
ATACAATCCATCTATGGTGCAAATCAATGATAAAGAACTCTCATG
CGTCTACCATGTATGACTGTAGAATTGCTGGTGTAAGCAGAACTA
TAGCAGAGCAAATTTCAACATGCCCTTGGCCACCTGGGTTGTAGG
GGACACTTTACTTTTTGCATTGTGCTGTGACCATTTCATGCATAA
TCTTGGATCTTCATACTATTTGACAACCAAAAGAAAGAAAAGGGA
ATGGATATATATATACACACATATATTATATCTACATATACATAC
ATATGTATATGCCTACAGTACATTAGCAATGCTGGAAATAGCTGA
TGCCACAAAATGCAGCCTGCATGCATGCAGAAGTTTATAGCTGGC
CCTTCATCTGCATCGATTGGTGTTGAAGGTCCTTGGTATGTTTCG
ACAG

[1193] In some embodiments, the intronic domain that promotes trans-splicing primarily in the muscle comprises or consists of sequences from the gene MBNL1. In some embodiments, the sequences from gene MBNL1 comprise or consist of:

(SEQ ID NO: 1132)
TATGAGAAGCTTCATTATGCTTGGAGCACATTTTCGTGCCATTTG
CCAATGCTGTAAAATTGTGTAAAAATGTCAGCTGAGAACTGGAAA
TAAAACAGGGACATATTAATATACACGCCAGACTGTGGATTGTAG
TATGTTGAATTAGCCTAAGATGTCTAAATTGAAAGAACAGCAACA
AAATGCCTTTGTGTATCTGATTTCATTATTCTCCCAACAACATTG
CTGAAATGGGATTAGTATCATTTTATAGAAGAGACTTAAGCATAG
AGTAATGAGTTGCTTTGCTCAGGGTCACACAGCCAGTAAATGGAT
CTCTGGGGCTAGCACCCGTGTCATCAGTCCTCTGACAGTCTCAAT
CCATTGTGCTGCCTCTCTCAGGTTAGCAGGCATTAATTTCAGGTT
GAAGAATCAAGCTACAAATCCGAAGTTCTTAACTTTGGGAACTAT
TGAAATAAGTCAACTCTATATTGGTTTCTTATTGTATTTTCTCTC
AAGT

[1194] In some embodiments, the intronic domain that promotes trans-splicing primarily in the muscle comprises or consists of sequences from the gene SPARCL1. In some embodiments, the sequences from gene SPARCL1 comprise or consist of:

(SEQ ID NO: 1133)
GTACGTACCATCTTACTCCTTAAAATGTTTGGAACTTTTTGTTTA
AAAACTCAAACTCAAAGTGAAATCTCAATTTGTCACAATGGTGGT
TTTTTTGTTTGTTTTGGGATTTTTTTAGTTTTTGTCCCCCTTCCT
TACACCTTTGTGTAAGAGGTAAAATGGAGAATTTGCAAAATAACT
AGAAAAAAGCTGGAGTGGGAGCCAGGAAATCTAGCTTCAATCCCA
GCTCCCCTTCTACAGAGCTCAGTGATCTCCAGCATGTCACACTGT
AGGCTTTCTAGGCCTGTTCTTCATCTGCCACATCCTGGGGTTGTT
GTAAAGATCAAATAAGGTAATATCCCATTTGTAAATTTATTTGGT
AAACCCAAAGCACTATGGCAATAGAAATGTCAAGTATATTTTATA
TGCCATTACCCGTTCTAAATAAAGTAAACACCCATTCCATTGTTA
ATATTCTAAATTTCTCCTTGTTATATGTAGTCATTTTCAGAAGGA
TCAC

[1195] In some embodiments, the intronic domain that promotes trans-splicing primarily in the muscle comprises or consists of sequences from the gene SPARCL1. In some embodiments, the sequences from gene SPARCL1 comprise or consist of:

(SEQ ID NO: 1134)
GCATTCACTAGGAGGATAGAATGTTTTAAATTATCATCGCTAATA
GAGTCCACATATTTACTTTAAGCATGAATTACCATATATAAAATA
TTTTATTTTAATACAATAAAAATCATGGAATATATTTTAGTGGGT
TTAGTAGTTTAAGGGGAAAAGATAGCAGCAATTTAGGATTCATAC
AATTAATGGAATTATTTTCAATTTTAGAATCCTAAAATATTAGGG
TTAGAGGATCATCTAGGTCTCACTCTTCATTGTTCATCACTTGAG
AAAACTGTATCTAAGAAAGGGCAAGTGACTTTCCCAAGGTCTCCT
GGCAGTCAGGGACACTGCTAGAGCCAGAATCCAGCTCTCCTGACA
GTTTAATGCTTTTCTTGTTTTAAGGTGTTTTTCAATGTATTAGAG
TTTTGGGGCAGCGGGGGGAGGTTGCTCCATGTTTTTACTTAAATA
CATTTTTCTTTCATGGAAAATTGAATTCCTATGCTTTTTGCCTTG
TTTA

[1196] In some embodiments, the intronic domain that promotes trans-splicing primarily in the muscle comprises or consists of sequences from the gene PALLD. In some embodiments, the sequences from gene PALLD comprise or consist of:

(SEQ ID NO: 1135)
AAAAGAAATATACTGCATGATGATTTGTGCTTTTCGATTTAATGT
CACACAATCGTTTTTACACTGTATGTGCTTTCCCTCCCCACAGCC
CCAGTCCCAGCCCCAGTCTCGCAGTTCCATTCCTTCAGGGCAGCT
TCCATTCTACCGTGAGTTTTTATTGCTTTCCCCTAAAACGCTGCC
CTGGAGTCGCGTTTATTGGACACTCTTTAGTCTGTAAAGGAAAAA
AACACAAACACCGGAGGAGAATCATCCTAACAAGCCGACAACATA
TCTATGGGCCTAAAAAACTTAAATTCTTTCCCGTTATTAGCACTT
CTCGATCGTTCCAGGAAAGCCCGATTTGTAGCTTGGCTGCCCCAG
GAAGGGGCCTGCGACCAGAAAGATGCAAAGGGCGGGACAAGGTTA
CGAGTGGGTGCGGGGAAGCCTCCCTAACCTGGGGGCCGCGTCCCA
GAGCTGCGAGCCACGCCTCCTCTCTCCCGCCCGCCGCGCCGCCGG
ACTC

[1197] In some embodiments, the intronic domain that promotes trans-splicing primarily in the muscle comprises or consists of sequences from the gene PALLD. In some embodiments, the sequences from gene PALLD comprise or consist of:

(SEQ ID NO: 1136)
TAGGCGCGGGGAATCGGCCCTGAGGCTGGTGGAAGAAATGTGTGA
ATTAAAGGGAGTGCAGCGTGCAGGGTGGGCCGCGAGTCGGGAGTG
CAGGGCTCGGGACAGGGTGGGGGCGGGGAGGACAAGAGACTCGTC
AGCGCACTTTCCACCCGGCCGGTTCCTTCCCGAGCCCTCTCCCTC
CCCCGGCCCGCGGGAGCACAGATCCCTGAAAGCGGAGCTCCAGAT
AGGAATGTCTGCATCATCTTGGCAGGGCCCAGACGGGAGAAGATG
CTCTGCTGCCACGGACGATCCCTCCCGCTCTCCTAACTCTTCTCT
GAACACCTCGCACCCCCACGGCCCCCCGCCCCTCTCTTAATCTTG
GCCACGCTCCCTGAGGGGTCAGACCTGGGGTGGGAGAGCAGAGAA
AGCGGGGCTGGCAGAGACAGGGGTGAGGGCCGGGAGAGGCGATGA
CATCATTCCCTGGCAGCTGGCGGGGAGAGGGTGGGGACGGAGGGG
TCCC

[1198] In some embodiments, the intronic domain that promotes trans-splicing primarily in the muscle comprises or consists of sequences from the gene ASB5. In some embodiments, the sequences from gene ASB5 comprise or consist of:

(SEQ ID NO: 1137)
GTATGTTTATGATAATCCTCTCTTGTTTCAAGTGGAGTTTAACTT
TCATCTGATCCACAATTACATGTTTTCTTTTTAGACTGCTTCAAG
GTAAATATTTTATAAACTTTTGTTAAGGGAAATACTTGTAACTCA
CTTCGTGGCTTTATAAAAAGGAAAATTACTTTTTTAATGTAAATG
TTTGGGTTAAAATCAAGGTATCATTGCAAAAGAGATTAAGGAAGG
CATACTATATATATAATAGGAATATATATATGTAATAGAAATATA
TCTATTCCTATTAAGAAACATTTTAAAAAGTTAAACATTTGATCT
GCCAAGTCATAGTATTAGAGATTAGTTTTAGAAGTAATTGATTGC
ACTTCAGTCGTCCTCTAATGTGTACCTGGATTGTATAATTTTAAA
TTAAATCTTTAGTTATGTGTAAAATAATTGTTATTAAAAAGAGGG
GATTTCAAGATTTGGTTTCTCACAACTTTAATAAGATAACCATTT
GACT

[1199] In some embodiments, the intronic domain that promotes trans-splicing primarily in the muscle comprises or consists of sequences from the gene ASB5. In some embodiments, the sequences from gene ASB5 comprise or consist of:

(SEQ ID NO: 1138)
CCATTGGATGAAGGAACCGTGTTAAGTTATTAATCTGTGATGTTC
CAGTGTAATGACTTGTAAGAAAAATGTTTTTTTAAATCAGTAAAA
ATAACATAATTGGTTAATTTGATGAGTAGTCATTAAAATACAAGC
CATGGACTGTGTACTGATTTAGCTCATGGTCTACAAATAGTACAG
TGCCATTTTAAAGCCTTAAATGATAGACAACTTTACTCGATATGA
ATATCATTTACATTAACAATGGGAACCCCATACACTGTCTTCAAA
TTGTTCTTGATAACTAAATATATAAAATGGAAAGGATATGCATAT
ATATTTCAATATCTGGATTTTGAAATTTGGAGCACAGAGGTGGAG
TGTCATTTTATATTGAGAATGGAAAGTCAGGAGACTTGTGACACG
TGATGCAATTGCTTCCATGGAATATTTTCAGACCAATAGGAGTTT
GCGAAGAACTTTTATGGAGTGTATAAATATTTTGAGCTGTAGGCA
TCAC

[1200] In some embodiments, the intronic domain that promotes trans-splicing primarily in the muscle comprises or consists of sequences from the gene CMYA5. In some embodiments, the sequences from gene CMYA5 comprise or consist of:

(SEQ ID NO: 1139)
AATATTACTCATTTTTTAAAATTGGAAAATATAGAAAAGCACACA
AAATATCACTCAGATAAATACTGATTACAGTTTTGATCTCTATCC
TTCATTGAAAACATTTAAGTCATTTTTCCTGCTTTAGAGAATTCT
ATTCTGGAAGCTAAGCCATTGGTTGATGAATAGAGAGAAGCAGAG
CATAAGCAACTCATTGCCAGTCCCGCTGATCACAGAGACAGAGCC
AACTGCAAATGAAACCATCCTCCATCCCTGTCCTGACACTGCCCA
TCCCACCCATTCCCCCTCCCCTGCACCCCGCCTTGTGAGCACTTA
TGTCCTTGCTGCCCAGACTGAGACAAAAACAACCTCAGGGAAGCT
GAGGGGTTATGATTTTCAAACGTGGGTAATCTTAATGCTCCTGGT
TGTTTTTTCTTTCTGTTGTTAATTAGCTTCTCTCTCTCTTTCTCT
CTCTCTTTTTCTCTCTTCTCCTCCTCCTTCCTCTCTCTTTCTCCC
TAAG

[1201] In some embodiments, the intronic domain that promotes trans-splicing primarily in the muscle comprises or consists of sequences from the gene CMYA5. In some embodiments, the sequences from gene CMYA5 comprise or consist of:

(SEQ ID NO: 1140)
TATATAAAACATGATACAATGTAGTGGCAAACAGCATGACTGGAT
GCTTGCTTTTTAATATTTTGGTGCTTTATGGAAAATGAGCTGCCA
ATTAAAAAATGCATTTAGTGGGCTACAGTATTTTCACTTTTAGAC
ACAGTGCTTTTAAAAGCTAAATGACAGCTTTGAAAGAAAACTGCA
TGTGCTTTAGTTAAATAACAATTATCATAATGTAGATTTTTAACT
GCTTCCTCAAGATGTATTCTGCATTTTCAGCCTAATCTAGGCCAT
CTTTCCTGTCACTGCATATAGAACATTTTGTAGATGCTTAGATGC
ATTGGTTAAACATGAGTATTTGAAAGAATCATTCATATCTGCCTT
GAGTAATTTTATGATTTATGTAATTTTAATGAACTGTTCTATCAT
TTTCTCTTCAAAAGATAGTCATGCATTTATCTTCTCTTTCTGCTC
AGCTAACCTAAATGAATCTCCCTCCTTTGATTTTGTTTTGTTTTG
TTGG

[1202] In some embodiments, the intronic domain that promotes trans-splicing primarily in the muscle comprises or consists of sequences from the gene MEF2C. In some embodiments, the sequences from gene MEF2C comprise or consist of:

(SEQ ID NO: 1141)
GTGAGTGCTCACATTTGTTTTTATCATTTACCACAGAGTTACCAT
AAAGGTAAAACTGCCAAACTCCTTGGCCTTAGGTATTTACAGAAT
AGACGTGTATAACAATAATAAAGAGTTAAATGACCACCATACACT
TTATATTATAAGCAATGACATATCATTTTGCTTAAAGATCATGTC
ATCTTTCAGGGCCTACTTTTGCAAGTACTGTATCTTATAAAATTA
ATCTATTTCATGGGAAGTCCTGTGTATCATCAATACTATAATTAG
ACAAAGATTAAAATATGTAATGCTATTGGAATTTGTGTTTCACTG
CTTTTTAGATTTTTCTAAACCACCATGTTCACTTATCATGTTTGT
GTTAAAAGTATTCTGGCTGAGGAACAAATACTATACAGTTGAATA
ATCTTAAGGGGTACATTAATCTATAGCCTTTCTTCATCTCAGGGT
GGGTTGCTGTGGCAACCGCCCCAGTTCACTTTAAAATAATTTTTA
AAGC

[1203] In some embodiments, the intronic domain that promotes trans-splicing primarily in the muscle comprises or consists of sequences from the gene MEF2C. In some embodiments, the sequences from gene MEF2C comprise or consist of:

(SEQ ID NO: 1142)
GGCCTTTAGGCAATGCATAAAATAAGCCCTTTCAGTAACCTCAAC
TGCATTGCAAACATTTCCCGATTTGACAAATTGTGTTAGCTTCGG
ATATAATGGATTTGACATTCTTCTGTAATTCTCTATCAGATATAA
AACTGAAGGTACAGAAATACAGATAAACATAGAATCCTTAGATAT
GTGTAAACCTTGTCTTGAAATAACAAATCCTTTGTATATTGCAAA
TTCTCAATCACAGACATTCCACATGCTGTATATTCTTCTTGGGTT
AATGCTGCACCTAGTGAATTTTTGAAATTTAGATATTTGGCACTA
TTTATGTTAAAGATTATTATCACAATGCATGACAATTTCAGTTGT
CTTATATTCAAAACACTTTGGTTTAAAATCAGAATATTGTTACTT
CAGATTAGAAGTTTTAGAAATAAATCTATTTGAAAGTATTTTCAT
ATCAGCATTAACAAAATACTATATACTGTTTTGCACTTCCACATT
TGAA

[1204] In some embodiments, the intronic domain that promotes trans-splicing primarily in the muscle comprises or consists of sequences from the gene CSNK1A1. In some embodiments, the sequences from gene CSNK1A1 comprise or consist of:

(SEQ ID NO: 1143)
GAAGTGGCAGTGAAGCTAGAATCTCAGAAGGCCAGGCATCCCCAG
TTGCTGTACGAGAGCAAGCTCTATAAGATTCTTCAAGGTGGGGTT
GGCATCCCCCACATACGGTAAGAACCCGGTGCATATAGGCGATCC
GCTGAGGGAAGCACGGAATGGGGAAGTGGGTAGAGGCAGGTAATG
AGACCAGCTGAATCCGGGTCTTGGTGTTTTAGTTACCTGGGTTCC
CTATAGCTGGTGGTTTCCTGTAAGTCAGTCATCTCAATTACTGAG
TAAATTTCAGTTTGCCAACTTATTTCATTGTATTACACTGCTCCA
TTTCGCTTCCGTCATTCTCACTCTTCCCGAGGCTTTCATTTGCAG
TTATGCGTGCAGGTCATCTTTGATCCCTACGCGGAAGGGTTGGCT
GCTGCCTTTTTTACGGCGGCACTTCTGATGTACTTAGGTTTGTCC
AGTGAAGTGGATTTGAAGGTGCCGAAGCGACCCGGCAGTGTCAGT
TCGA

[1205] In some embodiments, the intronic domain that promotes trans-splicing primarily in the muscle comprises or consists of sequences from the gene CSNK1A1. In some embodiments, the sequences from gene CSNK1A1 comprise or consist of:

(SEQ ID NO: 1144)
GGGGTGGGGTTCACGATAACGCTGCGCTTTTACTCATTCCCCCCA
CCACCACCGTGCACCCCCAAAGTGCTCGGGCCTCTCCTCATCGCA
CGCACTCGCCAGGGAGTCCAGGGAGCTAGTTTTCCTGGCTTACGA
ACCTCGTCCGCTGTCTCCCTAAAAGGGTCAAGAACCCGATAGAAA
GGTTGGGGGAACTAGTTTCCCACCTTGTTAAACACGTCCCATAAA
TGTCCCTTAGTCGAGCTTTTTTTTTTTTTAACCGTCTTTTAAGGT
GGAAACGGCAAAATCCTCTTTCAGTGATTCCCATGTTTTTTTTTT
TTTAATTCTTAATTCTACTGGGCCTCTTGTTCCAATTAGAACAGT
TTCCGATCGCCTAGTTCCTTAAAAACCTCTCACTACGTTCAGAGG
TTGCCTCTTTTTTCTGGATGAATCATTTTCCTGCACTTTAGAGGA
CGTACGGATTTCGTCACTACCCCCTGAAGAGGCCTTTGAGGCTGG
TTGC

[1206] In some embodiments, the intronic domain that promotes trans-splicing primarily in the muscle comprises or consists of sequences from the gene TRDN. In some embodiments, the sequences from gene TRDN comprise or consist of:

(SEQ ID NO: 1145)
GTAACAGAGTTAATTTAATATAATATTACAAATTTATTAGGAAAT
ATATATTATTGAGAACACAGTACATTAGCTGCATCCCCTTTGCAA
ATATGTAAACCAGAACTGCAGAGGTCACACACATATTTTTAAAAA
CTTGTGTTTATTTGTTTGTCTCTAAAATTATTTCTTCTCATTATT
ACCAAGAAAGTGCTCTGATTACAATTCCCAAAAATCCCAAAGAGA
AAAGAAAGAAAAATGAAAAAAGGTTTTTTTAATGAAAAAGATAAA
AAATATAGAAGGGAAGTAAAGAATATTAAGAAGCACTTGTCCCCA
AATTCTCTGATTCTCTCCTTTCTATTCCTAAAATATATATTTAGT
GCATAATATATCCCAAGCACTTGGTAAACATTGGAGATGATGATG
ACAACAAAAATGGCAAAGCTACAAATAGGAAGTAATATTTGGTAA
TTAGAACTCTGCATTCTGATATTTTCAAATGCTCTGAGGCATATT
CTGC

[1207] In some embodiments, the intronic domain that promotes trans-splicing primarily in the muscle comprises or consists of sequences from the gene TRDN. In some embodiments, the sequences from gene TRDN comprise or consist of:

(SEQ ID NO: 1146)
TACTGGAGCCAGTACTTATGTGCTTGAGAGCATAGATATAGTGGT
TCAAATCCAAGGTCTCCTATTTAAAGATCTTGGAAAGTTATTTAA
TCAATTTATGTGAAAAGTAGAAATAATAACAGAACCTATATACCT
CATGGAGTTGTGAGCACTGAATGAGAAAATGGTAGAGAATATTGC
CTGACACGTAGTAAGTAGACAATGTTAGCTATCATTCTTATATCT
TTCTTCTTCAAAGCCCATGTTAGTTTACATGTACCTTTTTTTGTA
TATATGGCATAGTCTGTACTAGTGATAGAAATTCATGGGCTTATT
TTCTATTGTTTACATATTTAGTCCAATGTCTTATAGACAACATAT
GCCTGGAGACATTTGTATTGTGAATATCAACTCAGATGCCCTGTG
ATCTTAAGCCTCAGTATACAAAACACATGAAGAGACTTGCATTTT
TTTCCTCTCTTATTCCTTGTAACTTTTTCTTCCCATGATCTCTCT
TGCA

[1208] In some embodiments, the intronic domain that promotes trans-splicing primarily in the muscle comprises or consists of sequences from the gene CCZ1. In some embodiments, the sequences from gene CCZ1 comprise or consist of:

(SEQ ID NO: 1147)
TTGCTATAATAAAGTGAGACAGGATGATATCCATTTGCTGTCTTT
GTAAACGTGTGTCAATGGAAATCGTCACAGAATAATGGACAGTTT
CTGCCAATTCTCTATTCTCTCTGGACTATACACAGAGAGACTAGA
ACAGTGAACCCCTAAGTCCCCATCACACAAGTGAATAAGATTCTG
GTCTTCGTTGCTTCTCCATGTTGTGTTGTCGGGTTTGCAAGAGCA
TTTTAAGTCATCACGTCAGTCACGAACACTTCCCTGTGCCTCTCT
GATGAGGACATCCGTGGTAACCTCCCCACTGGCGCTGTCACACCT
GACAAGGTCAACAGCACTCCCCTCGCATCATGGAATGGGCAGTCT
GTGTCCAGATGGCTCTAGTTGACCAAAAAGCAGCTTCTTACAGTT
GACTTCTCCCCATTGACTTTGAACAGATTGTTATTATACGAAAGT
CTCCTTTTTTCCACCATTTCATAACCTCTGGTTTGTTCTGTCTTC
CCAG

[1209] In some embodiments, the intronic domain that promotes trans-splicing primarily in the muscle comprises or consists of sequences from the gene CCZ1. In some embodiments, the sequences from gene CCZ1 comprise or consist of:

(SEQ ID NO: 1148)
TGGGTACGCGCCTTTGTCTGATTTCAGCCTAAGCTTTTTGTACTT
TGCTGCATCCTATTCTTAAGTGATAAATATGTTTTGGGGGTTTCG
GTTGTTTGGGCTTTTTTTGTTGGAGACGGGGTTTCACTCTTGGAG
TGCAGTGGCATGATCATAGCTCACTGTAGCCTCGACCTCCTGGGT
TCAAGTGATCTTCCCACCTTGGCCTCCTAAGTCGCTGGGACTGCC
AGTACACACCGCCGGACCCAGCTAATGTTTTTGTGGTTGTTTGTT
TAGACAGGGTCTCACTATGTTGCCCGGGCTAGTGTCAAACTCCTG
GGCTCAAGCGATCCACCCATCTTAGCCTCCCAAAGTGCTGGGATT
TCGGGCGTGAGCCCCCACACCCAGCCCATTAAATGATAAATGTGT
TGTCATAAGCAATATAGAGGCATAGAGAGGAGCCCTGTTCCCCAT
CTGGGACCCCCCTGTCTCCTTAACTAGCCAGTGCTCATATTTTTT
AAGT

[1210] In some embodiments, the intronic domain that promotes trans-splicing primarily in the muscle comprises or consists of sequences from the gene GTF2I. In some embodiments, the sequences from gene GTF2I comprise or consist of:

(SEQ ID NO: 1149)
TATGATAAAAAATAAATAAATTAATTAATTTAAAAAAAAAGACCC
CAAATGTTTGCTTTTAACAAAACTGAATTAAGAGAATCACTGCAG
GCCGGGCGTGGTGGCTCACGCCTGTAATCCCAGCACTTTGGGAGG
CCGAGGCGGGCAGATCACGAGGTCAGGAGATCAAGACCTTCCTGG
CTAACACCGTGAAACCCCATCTCTACTAAAAATACAAAAAGAAAT
TAGCTGGGCATGGTGGCGGGTGCCTGTAGTCCCAGCTACTCAGGA
GGCTGAGGCAGGAGAATGGCGTGAACCTGGGAGGCGAAGCTTGCA
GTGAGCCGAGATCGCGCCACTGCGCTCCAGCCTGGGCGACAGAGC
AAGACTCTGTCTCAAAAAAATAAAACAAAACAAACAAAAAAGAAT
CACTGCAAACAAGAGTACTTTCTAGCAAAATCCATTCTGATTTGC
AACAGCACTGATAAATAACATGGTTATTGGGTTTCTTTTTGTTTT
CCAG

[1211] In some embodiments, the intronic domain that promotes trans-splicing primarily in the muscle comprises or consists of sequences from the gene GTF2I. In some embodiments, the sequences from gene GTF2I comprise or consist of:

(SEQ ID NO: 1150)
TAAGTAAAAGCCAGTATTTATGTCTTTAATAACATATCAACAAAG
GGCCATGTCTGAATGAAGTATAGAAGTTCGGGACCAGCCGGGTGC
AGTGGCTCACGCCTGTAATCGCAGCACTTTGGGAGGCCAAGGCGG
GCGGATCAGGAGGTCAGGAGATCGAGACCATCCTGGCTAACACGA
TGAAACCCCATCTCTACTAAAAATACAGGAAAATTAGCCGGGCGT
GGTGGCGGGCGCCTGTAGTCCCAGCTACTCGGGAGGCTGAGGCAG
GGGAATGGCTTGAACCCCAGAGGCGGAGCTTGCAGTGAGCCAAAA
TCGCACCACTGCACTCCAGCCTGGGCGACAGAGTGAGACTCTGTC
TCAAAAAAAAAAAAAAAAGAAGGAAAAAAAGTTCAGGACCTAAAG
AAGGAAGGTCCCAGAAACTGGGTTTCTGTTTCTTTCTACCACTAC
ACTTGCTACTGAAACCAAGCAGATGACTTCATTTCTCTTGGATTC
CACT

[1212] In some embodiments, the intronic domain that promotes trans-splicing primarily in the muscle comprises or consists of sequences from the gene POLR2J3. In some embodiments, the sequences from gene POLR2J3 comprise or consist of:

(SEQ ID NO: 1151)
GTGAGTCAATTAAACCTCTTTTCTTCATAAATTACCCAGTTTCTC
ATAGTTCTTTATAGCAGTGTGAAAACAGACTAATGGACCCTTCTG
GTTGAAGGAATGCAGCCATTCTGCTTGTTTGACTATGTCCTTTCT
ATTCATCTCTATTTCCTGGGAGGTGTTTATCCAAGTGCAATAGGA
GGTATTGGTGACCGCACAGTCCCCTCAGTGTTCTGCTAGTAAATA
GTTGAAGGTTGATCATTGATCTTCTGCGTTTTCAGTCTGGCATGG
AAAAGCCCCTGTGCAACTGGTAAAGATATCAATAAGCACCAGGAG
GTATCTAAATCCACCAGGAGCCATAGGCATCACGTTGACATCCAT
TTACCAGTCTTCCCTGGCAAGATTCTTCTGAATTGTGCTGCCTTG
GCCAAAAGAGGTATGGGAGGGGCTGGGCGCAGTGGCTTGTGCCTG
TAATCCCAACATTTTGGGAAACCAATTCAGGTGGATCGTTAGAGG
TCAG

[1213] In some embodiments, the intronic domain that promotes trans-splicing primarily in the muscle comprises or consists of sequences from the gene POLR2J3. In some embodiments, the sequences from gene POLR2J3 comprise or consist of:

(SEQ ID NO: 1152)
GAAAAGCCGAGGCAGGGTGATCACGAGGTCAGGAGTTCAAGACCA
GCCTGGCAAACATGGTGAAGCCCTGTTTCTACTAAAAATACAAAA
ATTAGCTAGGCATGGTGGCATGTGCTGTAGTCCCAGCTACTCGGG
AGGCTGAGGCAGGAGAATCGCTTGAACCCGGGAGGCGGAGGTTGC
AGTGAGCCGAGATTGTGCCACTGCACTCCAGCCTAGGTAACAGAG
CAGGACTCCATCTCAGTCAATCAATCAATCAATCAATCTCAGCGG
TTGAACTACCCTTGACATGGTTCAGCTCTGTATCCACACCCAAAT
GTCATGTCAAATTGTAATTCCCAGTGTTGTGGGAGGGACCTGGTG
GGAGGTGATTGGCTCATGGGGGCCGACTTCCCCCTTGCTGTTCTC
GTGATATTGAGTGAGCGCTTGTGGGATCTGGTTGTTTAAAAGCGT
GCAGCCCTCCCACTTCACTCTCTCTGTCTCTCCTGCTCCAACATG
GCCA

[1214] In some embodiments, the intronic domain that promotes trans-splicing primarily in the muscle comprises or consists of sequences from the gene ATP6V1F. In some embodiments, the sequences from gene ATP6V1F comprise or consist of:

(SEQ ID NO: 1153)
ACAGGGTCTCACTCCTGTCACCCAGGCTGGATTGCAGTGGCGTGA
TCGCAGCTCACTGCGGCCTCGACTTCCCAGGCTCAAGTGATTCTC
CCACCTCAGCTTCCTAAATAGCTAGGACTACAGCTTCCCAAGTAG
CTGGCACATGCCGCCACATCCAGCCATTTTTTTTTTGTGTGTATA
TATATAGATAGATAGATAGATCCGCCACATCCAGCCATTTTTTTG
TGTGTGTATATATAGATAGAGAGAGAGAGAGAGAGAGAGGGAGAT
GGGGGTCTCACTATGTGGCCCATTCTGGTCTCAAACTCCTGGGTT
CAAGCAATCCACCTGCCTCGGCCTCCCAAAGTGCTGGGATTACAG
GCGTGAGCCATCACAGCTGGCCTTCAGTATCTGCACATAAAAAGG
GATCTGCATACATATAATCTTATCCTTCCCCTTTCTGACACATCA
CTGCATATTGAATACACCAGTGTGCACCCTAATCAATCTTCATTA
CCAG

[1215] In some embodiments, the intronic domain that promotes trans-splicing primarily in the muscle comprises or consists of sequences from the gene ATP6V1F. In some embodiments, the sequences from gene ATP6V1F comprise or consist of:

(SEQ ID NO: 1154)
TAGGGTTGACAGAGGGTTGAGCGTGGCAGCCTTTCCCCTTGTCCT
CTGTGCCCTCTGGGTCATGCTCATTCCCCTCCACAGCCCAGCCCA
ACAACTCGGAGAGGGCTGCCTGGGTAGGAGAGACGGCAGCCCCCA
GAGCTGTCCTGGACTCCCTTCTCATCTCTCCCCACAGGCAATTTC
TAAACCGGGATGACATTGGCATCATCCTCATCAACCAGTACATCG
CAGAGATGGTGCGGCATGCCCTGGACGCCCACCAGCAGTCCATCC
CCGCTGTCCTGGAGATCCCCTCCAAGGAGCACCCATATGACGCCG
CCAAGGACTCCATCCTGCGCAGGGCCAGGGGCATGTTCACTGCCG
AAGACCTGCGCTAGGGGACTCCTCATAGCCCTCAGCCCTTCCCTC
GTTTCCAGGCCTCTCCCCAGGCTTGCCATCAGCCTTCTTTACTTT
TTGAGCCTCTGATTTCCAATTCCCTGCTCCTTCCCACTCCATTAA
GAGG

[1216] In some embodiments, the intronic domain that promotes trans-splicing primarily in the muscle comprises or consists of sequences from the gene ASAH1. In some embodiments, the sequences from gene ASAH1 comprise or consist of:

(SEQ ID NO: 1155)
GTGGATACTCTTTTATTCTTATGGGGAAATGGAGGCGCACAAGTT
AAATACTGAAATGTTTTAGAAAACTGTTTAACGAGAGGTAAAATG
TGCAATTATGGCTA
AGCTTTAGTCATTAAAATAATTTGGTTTATTAGATTAACCAGTTC
TCTCAAATTCTAATTAGTGCAGGTTTGATGGTAGAGAGGTTTGTG
GGGTCTCATCATCCCCACTTCATTGTAATCCCTTCATTGTCCGTT
GTGTTGTGTTCATCCCCTCTCATCGCGTCTCTGAGATCCATGAAC
CTACCCAGGACTCTAGGCTGAAAAAGAATCAGGAATTTATGGCGG
GTATAGAGGCATGATTTGGGATTGGTTGGATGTTATGAGGTGAGG
AGCAGCTGATTGGAGTTCATAGGGATGAGATGCATATCTCCAACA
GGCCACTGAGTTATCTTTGCTACTAGACATAGAAATCTAAATGCA
CAGTTGAAGGGAGAGGGGAGACTAGTAATACCTGC

[1217] In some embodiments, the intronic domain that promotes trans-splicing primarily in the muscle comprises or consists of sequences from the gene ASAH1. In some embodiments, the sequences from gene ASAH1 comprise or consist of:

(SEQ ID NO: 1156)
ACTGTGGTATTTATGTACCTTTGAATGACAAACAGACGTTCTGTT
CCTTTGAGATCATCCTTTTCAATTAAGTGCGTAGATTTGGGCAGC
ATCCATGGGCAGATATGAGGGAAGAAAAAGATAACCTGTTTGGCC
AGCATGACTAGTCAAATCAATGCTGAAGATAAAGGAACTGATAGC
CAGATCACCCCTGAGTCCATCTGAGTCCCATTCAGCATTTCTTTC
CCACTGCTCACGGGATGCCTAGCACTTGCTCTCTTATTTGTATAT
GTGTGTGTTGTGTCACTTGGACTAGTTTCCATGCCACCTAGGTAG
CCATGTGGGTTCAGGTGATGTTGCTGATATTATGAATGGCATGGA
CATTGCAAACACTAAGTCTCAAAAATGATGAAATGATATTTCTTG
TTTGCAGTGAAGTAGGAAAATAAATTGTGATGACTACTGTTGATT
GAATACCAATGCTGCTAAGTGTTTTTTTTATTTTTGCATTTTTCA
TATA

[1218] In some embodiments, the intronic domain that promotes trans-splicing primarily in the muscle comprises or consists of sequences from the gene CA3. In some embodiments, the sequences from gene CA3 comprise or consist of:

(SEQ ID NO: 1157)
GGCAAGATAAATTAAGTATTGAGAATGCCTTCTAGACATCTTCCC
CAACCAAATGGGGAAAGTTGAGTATATTTCTTACAGATGCAGGCA
AGGCTTTCAGTTTGACCTTTGCACATGGGATTATTTCATACTTTT
GGTCTTGAATAAAACATTTTTTAACTGCTGCAAATGATTGTATCC
TCTTGCCATTCTCTGTAACTCAGCATAGAAAGTTTGATTAACCTA
ACTGGTGCTCATGTTCTAAATTAAGGTCAGGTTGCCACCAGGTTT
CAGAGCTCTGGTTGATAAAAGGAGATAAATAAATAATTTTATATG
CTTTTTATTTGAGCCACTAGAAATGTTACCAAAATGTTACATGCT
ACTCTTTCAAATTTTCTCAGCTTTTATGAGAGTGCTCAGCAACCT
TAGCCTGTACAATGATTGGGTTTATTGTGGATAATGTTGTACTTA
TTTCCATATTCCAGGAATTTACCTTCTAATCTGTCTTCTATGGTT
TCAG

[1219] In some embodiments, the intronic domain that promotes trans-splicing primarily in the muscle comprises or consists of sequences from the gene CA3. In some embodiments, the sequences from gene CA3 comprise or consist of:

(SEQ ID NO: 1158)
TAAAGTAAAAATTGACTATATATTTTCTTCCAAAATGTATTTCCC
TGCCAATGGTTAGCATAGTTTGAGTTTCATTTCCTCATTTTTACC
TTCCTCCTTTCATATGCATTTTATTATTCATTCAACTAATCAAGA
TATTTCTGCAAAGATCAGCTCAAAATGTCTTACTTTTCTCTAAAA
GTGTATCTTTTACCACACTCCAGGACCCCTAGCACTTCTAAATTT
TCCCCAGATGTGGGAGGTGTGTGTGTGTGTGTAGGTGTTGGGGAC
AGAGCCTTAGAGTGAGCTTATTACGGTGGTGGTAAGGGCAAAGGT
GGCATATATTTATTTTCCTTTCTCACTGCTCAACTTCAATTGCAC
TGGAAACCAGAAAAGTCAGTGTTGGGAACCATATGATTCCAAGTC
CCTGGCTGGACATCCCCTCGGCTTGAGGTGGTCACCACTCACGTG
ATCCCAGGCTAAGATAGCACATGGAATGTGTGTGTTGTTGAGCCA
ACCT

[1220] In some embodiments, the intronic domain that promotes trans-splicing primarily in the muscle comprises or consists of sequences from the gene YWHAZ. In some embodiments, the sequences from gene YWHAZ comprise or consist of:

(SEQ ID NO: 1159)
GTAGACCGGGGCGAGGCTGCGCGCCGGCGGGAGGGGAGTCCACTG
CGGGGTGAGGTTTTGGGGTGGGGCTCGCCTGGGACCTAGAGCTGA
ATTTCCTGGGCTCCGCGGTGGGAGGAAGGACTTGAATTTTCCTGG
TGGGGGTGGGGGATGGGTCTGACTTTTTTTGCTCCTTGTGAACGG
GCGGGGGAGGTGTGGACGGGGGCTGCAAGTCCAGGTCGGGGTAGA
GAACAGGGTGGTGAGCCCGCAGTCGGCTCCCGTGCTTGATGGACT
AGAACTGGAGGGTCCCTGCGCTCGGTTTGGGGACGCATATCCTGC
TTTGGGGGCGGGTGAGCCTGAGCATAGCCGCTGGTGGCCCGCTCG
GCTGGGTGTGGCTCTCGTCCCCTCCCCCACCTGCAGCTGTCGGTC
CCTTAGAGACGCTGTACACGGTCACCGGCGCTGATCGGTGGCGGG
GAAGGCGCTGGGTGGGAGAGCGGGGTGTGTCCGCGGCGGGGCTGG
TAGT

[1221] In some embodiments, the intronic domain that promotes trans-splicing primarily in the muscle comprises or consists of sequences from the gene YWHAZ. In some embodiments, the sequences from gene YWHAZ comprise or consist of:

(SEQ ID NO: 1160)
CGCCCCGCGGTGGCGGCGCCGGGCTGAGGCGGAGTCTCCTCAGCG
GACACGGGCGGCGGCTCCTCTTCCGCTGGGCTCGGGAGGGCGGCT
AGCGGCCGCCTCCGGCTCCTTGCTTCCGCATCGACGCCCCGGCGC
CGATCGGTGCTCGCTCCCCCGTCCTGCCCCCGGGGGTGGGTAGGG
CGCCCACACGCGAGATCCCTGGGGATCTCCCTGTCGCCGGCTCCC
GAAGGTGGACGAGGCATGGCCGGGGCGCCGCCGGCCGCGATCCAT
CCCCACCCTTGTCTCTGCGGGCTTCCACCCCCTCCCTCGCCGCCC
TTCTCGCTTCCGCCCGAGATAATGACTCGGCGGCGGCGGCGGCGG
GCATCGCAGTGGCGCAGGTGAGGCCGCCCCCTCCCCTCTCCCTCG
GCCGCCCCCTCCTTTCCCTCCCCCTCGCGCAGCCTCCGCGCTGGG
CGCTGCGGCGGCGGGACCCGGCCCTCCCCCACCCCGGGAGGCGGT
GGCG

[1222] In some embodiments, the intronic domain that promotes trans-splicing primarily in the muscle comprises or consists of sequences from the gene SMARCA2. In some embodiments, the sequences from gene SMARCA2 comprise or consist of:

(SEQ ID NO: 1161)
TAATTGAAGAGGGAGCTAGTTTGCATCTCGTTCTTGCACACCCTG
AGTCATGAAAAACATTTTCTTTTAAGCAAAATTGAAAGAAAGAAA
AGAGAGAAAGAGGGCCAAAAAAAAAAAAAAAAAAAAAAAAGGTTG
CCATCCAGTGGAGGAAGGAGTAATTCCCAGCTTCATTCAGGAAAA
ACGCAGGCTGAAATATGCTTAACTGTTTTAACTTGACTGGGGATT
TTTACCACCATATGGGTTTTTTTTCGTGACATCCGGAGCCAAACG
GGTGCAGTGTGCCTTTAAGAAAAGAGGTGCCTCACTAAACTTCGC
TGTAGTTGTGTTTCACCGTCTCGGTAGGGAAGGAAAGTGTTAATT
TCTTATTTGTACACTTTTTTTCCCCGACTTCCTTCCTATTCACTT
CATTAAATCTAGAGGCAGTTGAGCATGGGAGCCGTCTGTATGTTG
AATTAGGGCTCGCACTCTTGCGCAACACGTCACCAGTCGGAAACT
GGGG

[1223] In some embodiments, the intronic domain that promotes trans-splicing primarily in the muscle comprises or consists of sequences from the gene SMARCA2. In some embodiments, the sequences from gene SMARCA2 comprise or consist of:

(SEQ ID NO: 1162)
TCAGTACTTTGTGTGTTTCCTTGTAATTCCAAAACCTAAATTTAA
TAAGAATCTGCACGTATTAGCAGTTGTAATAAAAATTGTTTCAGT
TGTTCTGTTTGCAATTTAATTTGTTTTCGCTTCTTAGCTACTCAC
AGATTTAGAGATTTAAAAGTCCAAATATCACAAGCTTATGCTTTT
TCCCTCTTTTCAAAATTAAGGCGGGGTGAGAGTAGAAATATCCTT
TTTACAACTCCCCCCAACTTCATTTATCTCAGTGAGAAGAAAAAC
AATGAAAAATTTTACAGCATGAAACTGAAAGTGAAGTGTTACAGT
TGTTCTGAATTTTCTTTAAAGAGCAGAATAACATATTATGTTAAA
ATATTTGAATCTTAGAACATGTACATTGCTTTTATTTACATGCAT
TTAATTTTCTTAAAAAATTGTCTTCTGTTTTAAAAATCATTTAGA
CTGCTCCAAACCATGCTGCTATTTTTTAAAAAATAAGGTACAAAA
TACC

[1224] In some embodiments, the intronic domain that promotes trans-splicing primarily in the muscle comprises or consists of sequences from the gene PLIN2. In some embodiments, the sequences from gene PLIN2 comprise or consist of:

(SEQ ID NO: 1163)
AGTGTGGTGACTCGGGTGGTCAACCTGCCCTTGGTGAGCTCCACG
TATGACCTCATGTCCTCAGCCTATCTCAGTACAAAGGACCAGTAT
CCCTACCTGAAGTCTGTGTGTGAGATGGCAGAGAACGGTGTGAAG
ACCATCACCTCCGTGGCCATGACCAGTGCTCTGCCCATCATCCAG
AAGCTAGAGCCGCAAAGTGAGTTCTGATTTTTCAAGATGCAAGTC
AAGGGACTGGTCAGTGGCGAGCCCCTGAGCTCACAGCAGTAACAT
CTGGAACTCCTCAGCCCTTCCTGGGGCATACACTGCCTTTACCTA
GAAACTTTCAGGTGACCCTCATTACCGTAAGAGGACTGTTTCTTT
TCTTTTCTTTCCTTTTTTTTTTTTTTTGAGATGGAGTCTCACTCT
ATCACTCAGGCTGGAGTTCAGTGGCGCAGTCTTGGCTCACTGCAA
CCTCTGCCTGCTGGGTTCAAGTGATTCTCCTGCCTCAGCCTCCCG
AGTA

[1225] In some embodiments, the intronic domain that promotes trans-splicing primarily in the muscle comprises or consists of sequences from the gene PLIN2. In some embodiments, the sequences from gene PLIN2 comprise or consist of:

(SEQ ID NO: 1164)
CTAATTTTTGTATTTTTAGAAGAGACGGGGTTTCACCACGTTGGT
CAGGCTGGTCTTGAACTCCTGACATCAAGCAGTCCACCCCCCTCG
GCCTCCCAAAGTGCTGGGATTACAGGCGTGAGCCACCGCGTCCGG
CTTGGCTAGCATTTTTGTTAACAGATACTCGGAGAAACAAGAGAA
GTATGTCAACAACTTTACTTCTCCCTCCTGAGTATTGCAAGTTTA
CACATAAGCTCTGAAACTTTGCCTCAAAAGAGGGAGTGGGGTTGT
GTGGGTGTGGGTCTTTCAGGAGGGGGACCTGGAGAGCTGGAGAGA
GGAAAGAAGTGCAGAAGACTACAGGGAGCTCACCCTGCATTTTTC
TCTACTTGTAATCAGCATTTGCTTGGGTTGGGGAATGAATTTGGG
AGAGTCTTATCCCGGTGTTCTGAAATAAGTCTCTTTTCTGCAGAT
TTCTTTCTCCAGGAAGAAAAATGGCATCCGTTGCAGTTGATCCAC
AACC

[1226] In some embodiments, the intronic domain that promotes trans-splicing primarily in the muscle comprises or consists of sequences from the gene SURF4. In some embodiments, the sequences from gene SURF4 comprise or consist of:

(SEQ ID NO: 1165)
GTGGCATTCTGAGCAACAGGGAAGCCTTTGAAACAGGCGGTTGGG
TAACTGTTGAGAGCATTCGGGAACTGGGTGGACAGGATCCGATCC
TACAAAGTGAAGGGACACAACTCCCTTCCCTCTTTCTTGATTAAG
CTTGACAGAACAAAAAAACAAAAACAAAAGGTGGTGGTGGTTACG
CAGATTTATGCCTTTTACTTCTAAAAGAATCCCGTTATGTCGACA
AATTAACAGCCTTATCCCCGCAGGGAGAGCCTTGTGTGGCCCACT
TGCCGTTTTTTCCTCGGTTTACTTAATGTGTTCGTGTGGCTTTGC
TAGAGTTTTAAGTAGTGATGGTTAAATTTTTAAATTTTTCTGGAG
GTGGTAGTGAGTCATCAAACTCTGAGGCCTAGACTTATCGGAAGG
CTTGTATATGTGTGGTTTAAAAAAAAAAGAAAAGAGTAAGTGACC
GTTTTCTGATCAGCTATTGAGCTCTTCCGTTCCTCCTGGGGGGTG
ATCT

[1227] In some embodiments, the intronic domain that promotes trans-splicing primarily in the muscle comprises or consists of sequences from the gene SURF4. In some embodiments, the sequences from gene SURF4 comprise or consist of:

(SEQ ID NO: 1166)
CCCGACCCAGGCCGCCCGGGCCGCTCCGGAGTCGGCCTCCCAGCG
CAGGGCGCCAGGCCCGGGCCGCCCCCTGACTCCTTGTTCCCACAG
AGGGACCCCCCCGCCCGGGCCCTCTGTCCCGGCTGGACAGCCCCA
AACCCGGCCTCCGGGCCCAGTCTCCCCTGCCCGCTGGGCCGCTCC
CGGAGCCCGGGCCTCGGCGCCCTGCCTGGCTAGCCGCCCCCACCC
TCCAGCCAGCCCGGGGCGCGGGCTGTGGGGGTTTCTTCCCGGGCC
GGCGGCGCGAGTCCTGGCGTTGGGTCGGGTCTGAGGCTCGCGGGG
AGCGCCTCGGCGTTTGGAGCTGCTGGGGGGTCCCCGCACGTTTTT
CCTCTCACTGGGGCTCCCGGAGGCGGGCTGGGAGCTCGGGGACGA
ACGGGGGCCGGGGGTCCTCCCAGAGGAAAGGGGGCGCGCTGGCGT
GCGCCCCAGCTACAGGAAGCCACAGCACCTTTTCCTTTTCTCTTT
CCCA

[1228] In some embodiments, the intronic domain that promotes trans-splicing primarily in the muscle comprises or consists of sequences from the gene DNASE1L1. In some embodiments, the sequences from gene DNASE1L1 comprise or consist of:

(SEQ ID NO: 1167)
CCCTATTCAGGCAGGAGCTGCTCTTCTGGGGTATCGCGATCCACT
TAAGGATGAGGCAGACTTGGTGACAAGCTGGTCTGAGCAGGTATG
GGAGCCCCCTGGGGAGACGGAAGAAGGGAGGAAGTTGCCTTCTGC
CTGGGGAGGGTTTGAGAGGGAGAGGGAAGCCTAGGGCTCCCACCA
AGGCTGATATTGACAGCCAGGGTTTGGGGCTGAAGCCAGGAACCG
TCACTCTCTCTGGTTCTTACTGGTAGCCCTCATGGGGGTCCCTGA
CGCCAGAGCCTCCAAGGCTGCATGTGCCAGCCCAGGGCTGCCCAC
ATACCCATGTATATCCCAGAATAGGCACCAGGGTAGGGAACCCAA
ACTAGCATGAGTGACAGAGCAGGTGGTCAGGGAGAAACAGACATC
AAACCCAGCCAGGAGAGAGACACCGCAACAGAGAGACAGAGAAGG
GAAACCAGAGACGAGAGGGAAAGTGAGACAGAGACGGACAGAGCC
TCAG

[1229] In some embodiments, the intronic domain that promotes trans-splicing primarily in the muscle comprises or consists of sequences from the gene DNASE1L1. In some embodiments, the sequences from gene DNASE1L1 comprise or consist of:

(SEQ ID NO: 1168)
CCTCCCTTGACTTCACGACTGTGGCCAGATCATGTGTGGACTGTC
CCTCTCTTTGGGTCTCCAGAGCGCTTGCATCAAACACCCCTAACT
CAGAAGTGTGCAGCCACACTGGGACTCAGAACCCAACAACAGGGA
CAGAAGACTCACGCCCTTGGGGTGCCCGGTCTCGTGGCATCAGGC
ATGACTTCCAGCTCCTGCGCCTTCCCCAGCAACTGCTGACTGGGG
ACCCAGACCGGGAGCTGAGCGACGGGCCTGGCGAGCGAAGCTCGG
GGTCTCACTCAGGCACCAGCCCCTCCTTGCCCCAGGCTTGAGTGA
CTCACAGGTCTGTCATGTCCCGCTGGCCCGGGAAGGCGGGGTCTG
GGTGGGAAGGTGGGCGGGCAGGTCAGCAGTTCCCAGGCCTGGTGC
TGGTCCTCCTTGTTGGCGGCGAGGCGGAGACGGGGCGGGCCTGCC
TGTTGGCAAGGGTGGGGCGTCCGGCCCAGCCAGGCCCTTCCTGGC
CGGG

[1230] In some embodiments, the intronic domain that promotes trans-splicing primarily in the muscle comprises or consists of sequences from the gene IDI2. In some embodiments, the sequences from gene IDI2 comprise or consist of:

(SEQ ID NO: 1169)
GTACACACAGCATCCAGTCTCAGCTGTGTCCACGGGAGTCCAGGT
TGGCAGCGGGCAGACGGTGAACAAAGTCCAGGCTGGATCTACACC
ATTGACCTCATGAAGCACCATGAGGATGAAGGATGGGGCTGTGGA
TGGGGCTGTGAATGAGCTGTGAATGGGGCTGTGAATGGGGCTGTG
AATGTAGCTGTGGATGGGGCAGTGTGAGTCCCTATGTGTCCCAGG
CAGGGTTGAGACTGTGCAGGAATCTGTCGACCACACACCGAAGAG
GAAATTCAAGCCGGGCGTGGTGGCTCACGCCTGTAATCCCATCAC
TTTGGGAGGCCGAGGCGGGCGGATCACAAGGTCAAGAAATCAAGA
CCATCCTGGCCAACATGGTGAAACCCCGTCTCTATTAAAAGTACA
AAAATTAGCTGGGCGTAGTGGCACACGCCTGTAATCCCAGCTACT
TGGGAGTCAGAGGTTGCAGTGAGCCGGGATTGTGCCACTGCACTC
CAGC

[1231] In some embodiments, the intronic domain that promotes trans-splicing primarily in the muscle comprises or consists of sequences from the gene IDI2. In some embodiments, the sequences from gene IDI2 comprise or consist of:

(SEQ ID NO: 1170)
TCTCAGTAAGGAAACTTGGTCAAAGGTATTCCAGCAGTCTTCCTG
TGAAACCATGCTCACTGATCACCACCCTCAAAGTGCAGCCCAGCT
TCCTCAGCCCAGCTGGTGCAGCCACCCAGCCCACAGCCCCACCAC
CTCCTCCCGCCACCCCATGGCATCTCAGGTCCTCTGTGGGTACAA
AACTGAGTAGGAACCAGTCCCTCTCCTAAGACATACTGGGATAGT
GCCACGGGACATGTGTGTGCACATCTGCAGGAAGGGCCGCAGGAG
CGGTCAGGGCCAGCCCCGCCAGGTGGTCATGTGGAAGACCCTCAC
CAAGCCCACAGCCGTGGAGGCTGGAGGCGAGTGCTGCTCTGAGAG
CCCATGACAAACCCACTCCCCCCGCCAGGCTGTCTTCTGCTGATG
ACGGATGATGGTTTTACATGAAGCATCTGCATTTGTATTTAATAT
ATTCACTTTTCAGGAATAAAGAGGGATGTTCCCACATGCATTTTT
TCCA

[1232] In some embodiments, the intronic domain that promotes trans-splicing primarily in the muscle comprises or consists of sequences from the gene AKR1C3. In some embodiments, the sequences from gene AKR1C3 comprise or consist of:

(SEQ ID NO: 1171)
ATGTTGCTTTAGTTTCTAAGCAACATAAATAGCTATTCTTAAGCA
TTGGGTTGAATGGATAGAAGAATTAGACTGTTAAAATGAGTTGTA
AACTCTACTGAAGATAATTCAGGTAACATCATAGTTATTACTTAA
TACTAATCTTTACATTTTAAGAATTTACTCCTATCATTCAGTAGA
TGTACAAACTATACATCCAACGTATAATAAAGTTTATAAGGATAG
GTCAGAGCCAAAGGAATCATGAGAAGGAAGAGAATATGTTTGCCA
GTGGTCATAAATTTTGAAGCAGTAGGAAAATATCTAAATACTAGA
TGGCACAAAGTAATAAGATTTGCTCAAGCATTCATTCAAAATCAC
CTCCATTCTTTAACCTCTGCAGCTTTGGTCCACTTTTCATCGACC
AGAGTTGGTCCGACCAGCCTTGGAAAACTCACTGAAGAAAGCTCA
ATTGGACTATGTTGACCTCTATCTTATTCATTCTCCAATGTCTCT
AAAG

[1233] In some embodiments, the intronic domain that promotes trans-splicing primarily in the muscle comprises or consists of sequences from the gene AKR1C3. In some embodiments, the sequences from gene AKR1C3 comprise or consist of:

(SEQ ID NO: 1172)
AAGACATGGCTACATTTAAGGATATGAAATAGTCTACAAAAATGT
ATCATTTGTCTATTCTTATCTCTAAACTCCAACACTTTTTTTTAT
TATTGTTGACCCAAACTTTTTCATTGGTGGCGATTATGGCTTTGG
AGCAGCTCAAGGCTCATGGTCATCACCATAAGACAACTCCTCTGG
GTCTCCCAACTTCTGCTGACCCTATGTGATTCACAGTCCTGCCCA
AAGACTATCAACTCTTCAGGTGGTCTGATAATCCTACCGTGTACA
AGAGTACAATCCATTATTTTTGGATATCAAGGTATTTCCAAATCA
AAGAGAGGTACTTCAATAGAGGAAATTATAAGGGCGGAATAAAGT
GACATAAGTCAACTGTGAAACTTGATTAAGACCTAGAAAATGGTC
CTTTTCCATGCATATAATATTTGTAAGAGATTAGAGGAAGCCTGT
CTCCTGAATACATTCCTTATACCTTCATATGTAAAACACTTAGCA
CATA

[1234] In some embodiments, the intronic domain that promotes trans-splicing primarily in the muscle comprises or consists of sequences from the gene TIMM23. In some embodiments, the sequences from gene TIMM23 comprise or consist of:

(SEQ ID NO: 1173)
GTAAGTCTCTTGTAACCATCTGATGTAGTGATACTTGAATATTAA
GCTCTGTTGTATTGGTTTGATGAGTACAACCTTGAGATTACAGAT
GGTTAGCATAGTTATGTGCTTTTTTGTCTTTGTTTTTTAATCTTA
ATCAAAATAAAAGCAACTAAGGAATCAGATTACTGACTCTAAGCT
TTTAAAAAGGAGTGATTTTTTTAATCAGTGTCCCTCAGTCAGCTA
GTGCTATGCCAGCCTGACTTCTCAGCTGCACCTGTTACATTCTCC
AACCCTATGTGACTTGCTTTTCAAATTGTTGAGTTGCTAATGGGA
ATTTTGGATTGTTTGGGGGCATGCAGATCCATAGGAAATGGTAAT
GAAGAATAAGCAGCTCATGAGAGTGATGGCTCAAGCTGCCATCAT
TTAACTTGAACTTCTTACTGTCTTGACTTTATGTTTCCGAAATGA
TGAGCCAGATACATTTTAAATAAAATTTTTAGAATTAGAGTTAAT
TCCA

[1235] In some embodiments, the intronic domain that promotes trans-splicing primarily in the muscle comprises or consists of sequences from the gene TIMM23. In some embodiments, the sequences from gene TIMM23 comprise or consist of:

(SEQ ID NO: 1174)
TTTCACTTTGATTTAGGTGTTACTGCTGCAGAAAGTTTTATTTTT
GTTTAAGTATAGGTTTGAGTTAATTTAAGGTTTATTTTCTGTGAA
AAACTACTTTGAAATGTTAAAAAGGCAACTTTACAAGATTTGTGT
CTTGAGGGACACTCAGCTTGGTTTTCATTATTATCCTTTTAGGAT
ACAGATGAGTTTATTTTACCTACCGGAGCTAATAAAACCCGGGGC
AGATTTGAGCTGGCCTTCTTTACGATTGGAGGATGTTGCATGACA
GGTGAGTGTTACATACTTTTTTCTCAAGAGTGCTCAGTTCAAGTA
GTTGAGGGTGCGTAAAATCAAAAGCAATTAGAATGTTGGTTTCAG
GGTTTTTTTTTTAATATTTACATTTGTCTTTTTCTATTAAATAAA
AATGAAAAAGAATCAGAAGTGTAGTTATGCAGATTTGAGTTTGTT
TTTTTAATATAAAGCTGTCTTTATCTGGGTGAATTGTTATGATTT
ACCA

[1236] In some embodiments, the intronic domain that promotes trans-splicing primarily in the muscle comprises or consists of sequences from the gene MYPN. In some embodiments, the sequences from gene MYPN comprise or consist of:

(SEQ ID NO: 1175)
AGTAAAGGAAGCTTTGTTGTGTTTTAATGCAAACCACACAGTAAA
GCTTTAATTTAATCACCTTAAAATTAGGGGAACAAACAGGAAGTG
TTGTAATAATTGATTGTTTTTTCGTATTTACCTTAATAAATGCCT
TGACCATAGTCCCAGTTTGGTACCAGATAAAGATATTTATACATG
TAATATGCATCCTGTGTATAGATATCTTATGTATTCCATATGCTT
TATTCTTGAGAATTTCTTCACTCTTATTTTCATTTAGACTAAGGA
GAAATCAAGAAAGCCTATTTCCTTAGTCATCTTAGTCATTATCCA
CCCCCACCAGCCCTGCAGGCTAAGAACATCGTGCAGACTGAGTTA
TTAAAGTTGATCTGAAAGAGCAATCTGTTCTAAATGACTGTCCCT
GGATCTGCAACGGAACCCTGTAAATACCCTTCATTACTCTGGCGG
GGCAGTATCACATTTCCTTCATGGCACTTTTGTGTCTGACACAAG
TTAG

[1237] In some embodiments, the intronic domain that promotes trans-splicing primarily in the muscle comprises or consists of sequences from the gene MYPN. In some embodiments, the sequences from gene MYPN comprise or consist of:

(SEQ ID NO: 1176)
TAACCACAAATTTACTTCTCAGGATAATGTTTTAAAGTGGGTGTT
CTGTTTAGTTTTTAAAAATGTTTTTAGTTTTTAAAACTAAGTGGG
TTTTGAACTTTTAGTTTTTTTTTTTAATGTTTTTAGTTTTCCCAG
GCAAGCATTTTCAGTAGTTTAGATGAAAAAGAAATTTCTTAGTGA
TTTCATTGTCTTTTTCAATTATATTGTTGTCATGCCTTTTATATA
AGATCTTTTATAATCCACCACCCATCTATTGTTTTGGATAGTCAA
GAACTTGTCTTTGCTGTGAAAATTTTTCTCATTAAAAATGGCTAA
AAAATACATACTTTCTCTGTTTTTCAAAAATACGGCATAGAGGTT
TTGTTTAGTTTTTTCATCTGATACTGGATATGTCAAGATGAATCT
ATGAACTTCAAGCAAAACTTATTGAAGCTTTGGTATATGTGAGTA
ATTTGTTTTAGAGAACTGGAGCCTATAGCGATATAAAAAAATAGC
AAAT

[1238] In some embodiments, the intronic domain that promotes trans-splicing primarily in the muscle comprises or consists of sequences from the gene TNNT3. In some embodiments, the sequences from gene TNNT3 comprise or consist of:

(SEQ ID NO: 1177)
CCACCCTCCAGCACCGCCAGAGGCCCCAGGGGAGGGCGGCTGTGC
CCACGGGGCTTGTGCTCTACCCAGGTGCAGCAGGTGTGGGGCGAC
CAGTCCAAGCCAGCCGGGCAAATCCGAGCTCCTTCTCGGGGGTTC
TGGGCAGGCCACCTGTTCCACCTGAGCTTCCACGAGCTCCCCTCC
GACAGAGGCAGGGCGATTACACTCCCTCCCAGAGCTGTCCCCAGG
GGGTCCAGGCATGAGGGACAGCCCTGACCTCACCCTTGGGGCTCT
CCCAGAGGGGCTGGCCCTGAGACGGGCTTCACGGCACAGGACCCA
GGTCCTTCCCATGCTGTGTTCCCAGAGCTGAATCAGGGACCCACT
GGCTTTGGATAGATGCGGCCACAGCGGGCCCCCAGGGGCTCCAGA
GCCTGGAGGGCCATCACCAGGCCAAGCTAGCCCACAGCCGGGCCT
CGATGCCCCAGCCGCCCATCCAGCCTTGTAACCATCTTGGTCTTT
CTAG

[1239] In some embodiments, the intronic domain that promotes trans-splicing primarily in the muscle comprises or consists of sequences from the gene TNNT3. In some embodiments, the sequences from gene TNNT3 comprise or consist of:

(SEQ ID NO: 1178)
TAAGTAGCCGGGTCCGCCCTGGGCCAGGCCCGTGGGTGTGCGTTG
CACGGTGAGGTGAACCTCTCGCATGGCAAAAACCTGGATCGCTCA
GGATGCTGGCGGCAGGGGGCCTGGAGCCTTCCTCCTGCCCCCGCT
CTCCCCTCGTGCCTGCAGCCGGGGGCTTCCCAGTGGCCGCTGCCC
TGTTGGCAAGCGAGGAAGGGCCCCCACCTTCCCAGGAGCTCCGCC
TCAAGCCAGCAGCGGCCACAGAGTGCCCCTGGGCACAGGCACGAG
GGCGGGAGCGGCTGGCCCAGGAGCAGCAGGGCCGTTCGGAGCTCT
GAGCTCAGCGGCTGAAGGGAGCTGGAGCTGAGAAGGAGGGGTCCG
CAGGCCTCACCTGCAACCCCTCCCCAGCCCCATCCGTGCTCCGTA
CCCCCCGCCCCACATCCTGCCGCAGGCTGAAGGTAAGTGGCCAGC
TACGGGCTGCTGTGTGTGGCAGTCCAGGCCAGTACAGGCTGGCGA
GAGT

[1240] In some embodiments, the intronic domain that promotes trans-splicing primarily in the muscle comprises or consists of sequences from the gene ZBTB16. In some embodiments, the sequences from gene ZBTB16 comprise or consist of:

(SEQ ID NO: 1179)
GCTAGAAGGGGGAGCCCCGGCTGTCAGCCTGGGCGCAGCTGCCTC
CCCAGCCCTTCCTCTTCAGGGCACGGTCGGGGTGAGAGGTGGGGG
GCGTAGCGGTGTGCGGGGGCTGAGGGCGTGAGCAGAGGGGTCGGG
GATCCGGAGGCTTTGTACCGCCAGGGGCTGGCGGAGCAACAGAGC
CCGTGGGTGCTCTTATGTATGCGGACCGGTGCGCGGGCGCAAGAT
AAGGTTGTGGTTTATTTATTTGTGTGTTTATTCGCCGGCCGGCTG
GGAAGCTAGAATCGGAGGAGCTGACGAGTAGATCTGGGGGCGGAG
GGGAGCAGGACTGGGACTGCTTACGTTTTGTTTCTCTTTGAGAAA
ACGTGGTGGGCTTTTTCTTGATTGGACTTGATCCCCACCCCCCTT
TTGCAGGGGAGGGAGGGAAGCTCCAGAGGGTCTGCAGCGCTGCGG
GCCCTCCTCGGCTCTCGGCGGGACCGGCGGTGACACCGGAGCTCG
CCGT

[1241] In some embodiments, the intronic domain that promotes trans-splicing primarily in the muscle comprises or consists of sequences from the gene ZBTB16. In some embodiments, the sequences from gene ZBTB16 comprise or consist of:

(SEQ ID NO: 1180)
TGGGTGCCGGTCTCTGCACCTGATGCGTTCGGGATGCCTTTCCCA
CCCTGGCGCGCCCGCCGCTAGCTCGCACAGCGCCTCGCACACTCC
CGCACGCGCTTGAAATGCGCACGGTCCCGCCGGCCCGCGGAACCA
CCCGGACGCACGGAGCGCTCCGCACCGACTCGCTCGCCGCCTCCC
CGAGACGCTCGCACCGTGCTTGGGCCGGGCGCGCTGGCCGCTGGC
GCCGCTGGCCAGAGGCCTGGGACCCAGCCGGTCGCTCCCAGGGGG
TCACGGCCCTGGGTCGGAGAGGGAGGGCGGGCAGACCCCTTCTCG
CCTTTCCTCCCACAACTCGCTGCGGGGCTTTTGTGCTTCCCCTTC
GCCGCGGGGCGGGTCCGCCTCCCCTGCCGCTCTCGCCGCGGAGTC
CAGCCCGCCCGGACTGTCGCCGTTCCTCCCCGTCTCTTTCGCTTT
CCCTCGTCCCTAGCTCAGCTCTCCTTCTTTCAGGAGTCTAGCTCC
TCGG

[1242] In some embodiments, the intronic domain that promotes trans-splicing primarily in the muscle comprises or consists of sequences from the gene STAC3. In some embodiments, the sequences from gene STAC3 comprise or consist of:

(SEQ ID NO: 1181)
GTGAGTCTGGGCCTCTGACCACTGGGTGTGGGGGGCTGGGAAGCC
ATTACAGCTGAAGAAGAGTGCTTAAATTGATCTCATTTGTGTGTG
ACTCATTTTTTGCTGGCCAGCACCTGCAGTCCCCAATACCAATAC
CCCCCTAATCCTGGGGTACATTCCTTGCCTGAAACTAGAAAACTG
TCTAGTTTGCTCTAGCGCCCCCCTACTCTAGAGAGGGTGACAAGT
CCTTTTAACATTGGGTTTTCTTCACTCCCTCCCTCAGCTACAGCG
GCTAAAGCAGTTACTCAGGAAGGGTTCTACAGGGACAAAGGAGAT
GGAACTTCCCCCAGAGCCCCAGGCCAATGGGGAGGCAGTGGGAGC
TGGGGGTGGGCCCATCTACTACATCTATGAGGAAGAGGAAGAGGA
AGAAGAGGAGGAGGAGGAGCCACCCCCAGAACCTCCTAAGCTGGT
CAACGATAAGCCCCACAAATTCAAAGATCACTTCTTCAAGAAGCC
AAAG

[1243] In some embodiments, the intronic domain that promotes trans-splicing primarily in the muscle comprises or consists of sequences from the gene STAC3. In some embodiments, the sequences from gene STAC3 comprise or consist of:

(SEQ ID NO: 1182)
GATTACAGGCATGCACCACCACACCCGGCCATGTTAAGCTTTTTT
CTAGACCTCCATGAAATCTGTTAATAAAACCTGCCAAAGGATCTG
TATTTGGCCCAGTGCAGTGGCTCACGCCTGTCTCAACAATTTGGG
AGGTTGAAACAGGAAGATTGCTTGAGCTAGTTCGGGACCAGCCTA
GGCAACAAAGCAAGACCATGTCTCTACAAAAAATAAAAAAGTAGC
CAGGTAGTGTGCACCTTGTGTTCCAGCTACTCAGGAAGCTGAGGT
AGGGGGATCGCTTCAGGCTGGGAGGTCGAGGCTGCAGTGAGCCAT
GATCACGCCACTGCACTCCAGCCTGGGTGACAGAGTGAGACCCCA
TCTCAACAGTAACAACAGCAAAATCTCTCATCACATTTCTCCGAA
AGCCTCCCCTTTGAGGACCACCCTACTGCAAGGGACAGAAAGGGA
GAGAAGAATGAAAGGGATTAGATTTCATAGTGGGGTCCAACCTCT
TGCA

[1244] In some embodiments, the intronic domain that promotes trans-splicing primarily in the muscle comprises or consists of sequences from the gene BEST3. In some embodiments, the sequences from gene BEST3 comprise or consist of:

(SEQ ID NO: 1183)
GTAAGTGCATTTTTAAAAAATCTCTAATATTTTCCAGCCTGAGCA
ACATAGTGAGACCTTGTCTCTATAAAAAAAAAAAAAGAAATAAAA
TAATTTAAAGTAGCCAACTGTGATGTCACCTGTAGTCCTAGCTAC
TTGGGGAGGCTGCAGTTGGAGGATTGCTTGAGCCCAGGGGTTCAA
GGCTGCAGTGAGCTGTGATTGTGCCATTGCACTCCAGCCTGGGTG
ACAAAGTGAAGCCCTGTCTCAAGAAAAATAATTAATTAATTCACG
AAAATTAAAATAAATATCTCCAATATCTAGGAAATGAACAGATAG
ATCACTGTTCTAATCTTTTTACCTTTTTTGGCATTTTTTTCTACC
TAGGCTTAGTATGTAAGTCAGTCTCTGTTCAGTGGTTTTAACACA
GCAATCACCCCTAAGTATAATGAGCTTTAAATAAATGAGTTGAGG
CCTGAAGTAAATCAGGTACAGTTCTATAATAATTTCATTAAGTCT
GAGC

[1245] In some embodiments, the intronic domain that promotes trans-splicing primarily in the muscle comprises or consists of sequences from the gene BEST3. In some embodiments, the sequences from gene BEST3 comprise or consist of:

(SEQ ID NO: 1184)
TGAGCAGTATAGACTTCTTGTTATGTTTTTCCAAACAAAGAAATG
AACAAGAAACCAGGGCATATAAGAAGTGATGTCAAGTAAAAATGT
GTTTACAGGGTTAACAGAATGAAAAGCGGAATCTTCACCTTCCTG
TAATATTTGGGGTTAAGTAGGTGCTATCAGGTAAAACAACACCAC
AATTGTGAGCAAAGAATAAAAAGATGGCTCCCCTCCCTCCAGCTA
AGAGGCAACTCCACTCTAGAGTGTGTGGTTTGATCCCGGAGTGTG
GGAGGCTTCAAGCCCCACTTATCCTCATCGCCAAGTGCTCTCGAG
TAGTAAACAACAGATACAACTCTCTGTGGCAGCTGTGGTCATGGC
AAGTATGAACTACAGACATTTGTATATTCACTCATTTAGACTGTG
TCCTAGCCCAATCTAACTCTCATCTGCCCAAAAAAACTTCTCCTT
TTTATTTAATTTACATCTGAGTTATTCTAACAATATAACAATGAT
TTTA

[1246] In some embodiments, the intronic domain that promotes trans-splicing primarily in the muscle comprises or consists of sequences from the gene MYBPC1. In some embodiments, the sequences from gene MYBPC1 comprise or consist of:

(SEQ ID NO: 1185)
ATCTTGACTTTTGTTTCTTAAATACTGAGAGCAATTAATCATGAG
GTTTTCTGGGTAGAAATGAGTTCTCAGATAGTACATATATAGGCT
TTTATGTCTGTGTCCAAACGAATGTGATATATGAATAAGGTCTGC
CATTCACTTTAGTTACAAAATCAGGACTTGAAAACCACTTCCATT
ATTGATTTCATCAAGGTTTGATTTTTAGCATTCATTTTTTCCTAA
CCTACAGTCACATAAAAAATTTGCAGTGTTCCATTTTTAAATCTG
TGCTTCCATTTGGATTACCCTACTCTGTCAACTTTTTATTTATTA
TTTTTTCTTTCTTTGCCTGAAAAACTCAGGTTTCACTTTTCAGGT
ACCAAGTTTTCTAAGGCTTGCTCAGCAGTTGAAAGTGTATTGTGT
GGTTTCTCATCTTCTTTTTCAGATTTCTCTTTTCTCAGGTTACTT
GGGATGAAGTCTTTTCTCCTTGACTTTTTACTCCTATTTCTTGTT
TCAG

[1247] In some embodiments, the intronic domain that promotes trans-splicing primarily in the muscle comprises or consists of sequences from the gene MYBPC1. In some embodiments, the sequences from gene MYBPC1 comprise or consist of:

(SEQ ID NO: 1186)
TTGGGATAATTTCTACCCTTTTCCCTGCTTTTAAATATATTATTC
ATTGACGGTAGAGGAAAAGAAAAGGCAGTGAGCCTCCTTGCTGAG
TCAGTGCACAGAGCAGGGGCAACAGTTTTCGCCTGTGCTGGCACC
AAGAAGGAAATGTTGGCTTTAATGACAATTTTTTGTTTTACGTGA
GAAACTTCTTAGAAAGAGGCATTCTTTGAGAAATAAATAAGATTG
GTAAATCTTGGGTATAAATGTTAGGGGTCAACATATCTGTCTTCC
ATTTCTCACTATATATCCACCCTTTTCCCTGTTCTTTAAATTTAG
ATATTTGGATTTTAAAATTTTTCTTTTCTTTTTTGAGACTGAGTC
TCTCTCTATTGCCCAGGCTGGAGTGCAGTGGTGCTATCTCGGCTC
ACTGCAACCTGTGCCTCCCAGGTTCAAGTGATTCTCGTGCCTCAG
CCTCCTGAGTAGCTGGGATTACAGGTGTGTGCCACCAAGCTGGGC
TAAT

[1248] In some embodiments, the intronic domain that promotes trans-splicing primarily in the muscle comprises or consists of sequences from the gene COMMD6. In some embodiments, the sequences from gene COMMD6 comprise or consist of:

(SEQ ID NO: 1187)
GTAGCCGTTGCCATTGTAATGAAAGCTCCTCTTCCCCACCCTGCA
CTAGCCCGAAGAATGCAGATCAAGGATTGTTGGGCTTTGATTAGG
CGACAGTTATTCGAAGCCAGGAACACGGTATTTTAAAGTGTTGGA
TAAAGAAGTTAGGAAAATTTGCAGAGATAGCACCGCAAACATTTT
CTTAGTCTCTAAGTTATTTTTGAAGATGGAGTATAGCATTTTAGC
CTTTTAGAGTATGCATTTATAATGCTAGGAATATGAATTTGACTT
TTAAAGTATATCTTAGCCCCATTTCTGTTTCAAGTGCTGCTGTGC
TGTTGTAGCCAATAAACTATTTGTAGGCAAATAATTTATAACACA
CTTCCCAGAATAGGAGTACTAAAACTAGAGTATTTTTAGGCCAGG
AGTTACCCAAGTCCATACAAAATGTAAGAAAGGGATGAGGTAAGA
AATAATTAGAATACAGGGGCTGAAAGAGGTGTCCATTGACTGCTG
TCTG

[1249] In some embodiments, the intronic domain that promotes trans-splicing primarily in the muscle comprises or consists of sequences from the gene COMMD6. In some embodiments, the sequences from gene COMMD6 comprise or consist of:

(SEQ ID NO: 1188)
GGTTGGGATTGAGGAGCCGCGCAGCGGGATGCTGTGCCCCGCCCC
GCTCCAGTCTGGAAGAGCCCACGTGTCACTGTTAGATGGGGGAAG
CGGCATCCTAAATTTAATTAGCGCTTCTCTTCTCAAAGTATCTCC
CAAATCTTTGGCCTTTTTCCATAAAATAATTTTCTTTTAGCTCAA
TGTCTCCTAAGATATATGTTGAATTAAGAAAAAATATGAGTCACA
TAAAGATGCTTTTTTCAGCTTCCCCTGCTACGTCCGCCCCATGCG
CCAGGCCGCTAGGGGCAGGACGTGGAAGCGGAAGCGCTGGTCTGG
GGGCGTTCTCTCGAGTCCGGGCCGCAAGTCCCAGACGCTGCCCAT
GGAGGCGTCCAGCGAGCCGCCGCTGGATGCTAAGTCCGATGTGAG
TTCCAACCTGGAAGGAGAGTGGGCAGCGAGGCTCTGGAGCAAGAA
AGATGTTTCTCTAAATTGTGTTTCTGCTTCCGTTTCAGGTCACCA
ACCA

[1250] In some embodiments, the intronic domain that promotes trans-splicing primarily in the muscle comprises or consists of sequences from the gene SLC7A8. In some embodiments, the sequences from gene SLC7A8 comprise or consist of:

(SEQ ID NO: 1189)
ATCAACCTGCTGTTCCCCATCATCTACTTGCTGTTCTGGGCCTTC
CTGCTGGTCTTCAGCCTGTGGTCAGAGCCGGTGGTGTGTGGCATT
GGCCTGGCCATCATGCTGACAGGAGTGCCTGTCTATTTCCTGGGT
GTTTACTGGCAACACAAGCCCAAGTGTTTCAGTGACTTCATTGGT
GAGTTGTTGGAGGCTCTGGCTGGCTTCAGGGCCTCCTGGGCTGGA
ATGCAGTGGTCAGTGATGGGGTTGGGGAGCCACCAGGGCCAGGAG
ATCTAGGCTCACCTTCTCCTCAGTCCACAGAGCCCTGGAAGAGTC
CAGAGCAGGGGAAGCAGATGCCTTTTCCCAGAGACCTCTGAGGGT
AGAGAACAGCTGGCATTTCCACACAGACCTTAGACCCGCAAGAAT
AGGCAACCTGGGCTGGGCACAGTGGCTCACGCCTGTAATCCCAGC
ACTTTGGGAGGCTGAGACAGAGGATCACTTGAGCCCAGGAGGTTG
AGAC

[1251] In some embodiments, the intronic domain that promotes trans-splicing primarily in the muscle comprises or consists of sequences from the gene SLC7A8. In some embodiments, the sequences from gene SLC7A8 comprise or consist of:

(SEQ ID NO: 1190)
AAAATCTGCTAGAGGGAAGAGGAGGTAGAATAACCCCATGTCCCC
ACCACACACATCCCTTCTGAGCGAGGAAGACAAGGAAGAGAAAGG
CAGCCGAATCAGGACTGCCCCTGGAGCCCTGAAGAGGATACTCTC
AGGAACTCCCCACATGTGGCCCATAAGGAGCTGACATTTGCCATA
TTGTGCCCACATAAGGGCCCTGCACAGAAGTGGGCAAGGACCAGG
GAGCCTGAGTGACTCGAATCGTCTCCTGCCTGCACCTTGTGCATT
GCCACACCTCCCCTCCACCCTAGGACCTCAGCAGACACACCCATG
TGCCAGCAAGCTTCTCCATCCCTGTGGGCTTCTCTGGCTGCCACG
GGCACATGGCATGCATGATGAGGCCTTGTCTAACCACACCCAAGA
GCGAGGACATGGGCAAGGAGGATCGTTTCCTCCCTAACTCCTCCC
CATCCTCTTCCTGTCTGACCGACCATGTTCATCAACATTTGTTTA
TATA

[1252] In some embodiments, the intronic domain that promotes trans-splicing primarily in the muscle comprises or consists of sequences from the gene MYH7. In some embodiments, the sequences from gene MYH7 comprise or consist of:

(SEQ ID NO: 1191)
TCCTGACTCCAGACTCTTCTTCACTGCCCTGAGGACCCGGGGATG
GGGTCTGGACTAGGGGAGGTGGAAATGCAGGGGAGTGGGGGCAAA
TTCAAAGGCCTGGCCTAGGAGGCCTTCGTGGAGCAGCACTGAAAA
CCCCTTTCACTTCCCCCAAACCAGCCAAATGCAGCAGAGGCGACA
CCTCTCCTCCCAGCCTTCTCCCTGGTCCAGCCAGGATTTAAAGGA
GATTTAGGGAGACCCCTAAAGTTCACCTAGAGCACCCTGAGCCCA
TCTACTGTGGACCTGCACCCCAGCTTCCGTCAACCCTGCCCCACC
CACCACCATGGATACTGCCCAGGGCTGGGCAAAGGGCAGCGGTTC
GGGGTGTGGGTGCTGGCCAGTGCCCTTTCTGAGCCCGCAGAAGTG
TGAACCACTGGGCCAGGTGAGGCAATGGCTGCCTAAGTGCCAGTC
CCAGGCGAGTCTCTGAGAGTACACAAGGATTCACAGCTGTAGCCT
GCAT

[1253] In some embodiments, the intronic domain that promotes trans-splicing primarily in the muscle comprises or consists of sequences from the gene MYH7. In some embodiments, the sequences from gene MYH7 comprise or consist of:

(SEQ ID NO: 1192)
CTCCTGACCTTGTGATCCACTCGCCTCAGCCTCCCAAAGTACGGGATTAC
AGGCGTGAGCCACCACTCCCAGCTCAGCTCTAAGTTTCAGTGGTTCTGGG
AATTTCAGCCTTAGGGAGGGGTGCCACCCTAGAAGACCCTAATTTATATA
CAACCAGTATATCCCAGTTTCCCCCCAACTGCTAGTTTCCAGTTCCCTTC
CACCTAATTTTGTCCTGCAATCTTGTAACTCAAACCTAAAATGGACATCC
CAGAGAACCCGGGCCTGGCTTTGTTCTCGCCCAGGCAACTTCCCTCTGAC
CAACCCCAGAACCCTACCCTCCAGAACTTGCCCCCCGAACATCGATCCCT
GGAAACACATGTGCTGCTGCCACAGGGGCTTCCACCTGCCCACAAAGCAG
GCCCCCCACCATCAGACCCCTCTCACCTTTGTTCCCATGCCCTGTCCCTG
CCCAATACCATCTCTCCAAGGACTGATTGGACTTTGTTTCCTTTCAAAA

[1254] In some embodiments, the intronic domain that promotes trans-splicing primarily in the muscle comprises or consists of sequences from the gene CCPG1. In some embodiments, the sequences from gene CCPG1 comprise or consist of:

(SEQ ID NO: 1193)
ACGGCATGCACTGCGGCGCCCAGCCGGTCACCGCCTGCCGGCTGCAGACG
CCTGCGAGCAGGTTGTTTTTATAAGAGGCGTCATTGGCGCCCGAGCTGTG
ACCGCCGCCACTGGGGCAGCCAGCACAATCGGGCGGAGGTGGCGCTGCCC
CTTCAGGTACTGTACTAGGCGGGCTTAGACCCCGGGAGGGGGTTTGTGCC
GACTGTCTGAGTCCCTGGCCGACACGCTCGGCTCAGTAGAGGAGCAGTGG
CGGGGTCCGCCTCCTAGGCTGGGGCTGCTCGGGCGGGGACTTGACGCCTG
GTGTCAGCGGCCGCACGGGCGACCTCCTCGGGCCGTGCGCGAGTGCACAG
CTCCGGAGGCCCGAGCCGACCCTGGGGCGTCCGGTCCGGTGGTCTTGCAG
CCTCCAAACCCCGAGTGCTATACCGAACTGCGCGCCAAGGGTGGGAGAGC
TGACGGCCTGGGCCACCCTTCTTCCTTCACTGGGCAGGCTTTGAGGTGC

[1255] In some embodiments, the intronic domain that promotes trans-splicing primarily in the muscle comprises or consists of sequences from the gene CCPG1. In some embodiments, the sequences from gene CCPG1 comprise or consist of:

(SEQ ID NO: 1194)
CAGTAGGGTATGAATGCATACAATCTCGATGGTCTTTACACCTTCAGAGG
CTATTCGGACTTAAGGAAACGTGCATTTACAAGTGTAAATGTAAAAGCTC
AGTAGTTGCCTTGTAAAGTGCTTTTCGGGGTTGTGGGGTTGGGGGTGGTA
GGAGTAGGTGGTGCCTCAAATTATACTAGCGAATACCAACATTCCCAAAC
ATCTAGCCCTCTGCCTAAACTCACCCGGTTGCGGTCTGTCATTTTCGCTC
TTCTTTGTTAATTTTTTCGGCAAAGTCAGTTTTCATGCAGCAGATGGCAA
GAAAGCCGGTGAACGCCTAGGGACGTGGCCTTTTAACCGCACCCAATTAA
AGCAGCAAACAGAAGATGAATAGCTGGGTGGATCAGTATGTGTAAACCTA
TCCGTTTAATCCGGGGAGCTGTTTTCCCGGGTGAAACCACGAATTCTTTC
TGGAGGTTGCAACTCGTAACCATAGCAACTGGAAGTGGTCGCCGGCTCC

[1256] In some embodiments, the intronic domain that promotes trans-splicing primarily in the muscle comprises or consists of sequences from the gene NOMO1. In some embodiments, the sequences from gene NOMO1 comprise or consist of:

(SEQ ID NO: 1195)
GATTTCATAAGGACCTGTGTTCAGGTCGTGGTGGAAAGACAGGAGGGGGC
ACGTGAGACCTTGCAGAGGTGGAATCCACAGGACTGATCGATGCTGGAGG
AGCGGGGCGGGGCATCCAAAGTGATGCCGGGGTGTGCATGGGAGACTGGA
GGAAGACGTGGTTCACCAAAATGGGGGCATCTGGAGGGGAGGAGATGGCA
CCGGGGTAAGGGTGGGGGGCTTCTAGAAGCTTGAGTCAGTGACCTTTTAA
CGAGGGAAGTAAGTCTCTAGACTTTTCTGTTGTTTGACACTCAGCAGTGT
GTTGGGAACACAACAGAGAAGACAGATGTGGGTAAAGTGAGAGGGAGCCT
GGCTGGCACACAGGACCGGGGCACTGAGTGTTGGGAGGTGGGCGGCAGGA
GCAGACATGGTAGGTGGTGGCCGGCGCAGCAGAAGGAGTCTTTGTGGCTC
TGGCACAGGAGCACCTTCGAGCACCTTCTTCTTGTTCTTTGTTTTCTAG

[1257] In some embodiments, the intronic domain that promotes trans-splicing primarily in the muscle comprises or consists of sequences from the gene NOMO1. In some embodiments, the sequences from gene NOMO1 comprise or consist of:

(SEQ ID NO: 1196)
TGGGCTGACACAGCAGCCCCAGGCTGATGGCCAGCGCTCTTTTTGGATCA
CAGAGAGAAATGGAGAGGAACTGATGACTATATGAGAACATGGCAGCTTT
TGGTCCAAGTATTCTGGTGTACATGTAAGGATACACTGTTGTTTTTGGCT
TATCTTCTGTTTGTGTGTTTTTGTTTTACAGTTAAAACAAAAGCTGATGG
CTCATTCCGCCTTGAGAACATAACCACAGGGACATACACCATCCATGCTC
AGAAAGAGCACCTCTACTTTGAAACGGTCACCATCAAAATTGCACCGAAC
ACACCTCAGCTGGCTGACATTATTGCAACAGGGTAAGCTTATCGTGTGGA
TTTGGAAGCGCCAGTAAATATGCTGGCAGCCAGTGTAGAACCGAATGACC
TGTGATCTGTGTGTCTTTGCCGAGCTTAAGAACTTAAGAAAGATTAGTAC
TTTTTTTTTTTTTTTTTTGAGAGACAGAGTCTTGCCCTGTTGCCCAGGC

[1258] In some embodiments, the intronic domain that promotes trans-splicing primarily in the muscle comprises or consists of sequences from the gene NOMO2. In some embodiments, the sequences from gene NOMO2 comprise or consist of:

(SEQ ID NO: 1197)
GTGAGACTTGGAATGTGTTTTCTTTGGGGACTTTTTTTTCATCCTGTGTC
CAGAAGTATCTTGTGGTGGCCCCAAGACTGCTAGGAGTGGGTTGGGCGAG
AGGGCTGGGGGTGGGGCTCTGGAGCCCTCCCAGTTCTTACCTTTAATTGG
TAGAGTTTGCCTTTTTTCTAGCCAACAGGTCAGATCAAGGATCTGTGGCA
CAATGGAGTTGGAAAACCATGGGTTTGGTAGGGCTTTTCCCTAGCAGTAT
GTGGCCATGGCTTACGCCAGGGCTCAAGCCAAACGCCTATGGAGCCAGAA
GAGCAGTATGAACGGGGGAGAGGAGGCTGTGCGAAATGATAGGGAGTGGT
GAGGGCTGTGGAGTGGGCACGGCCTGTGGAAAGGGACAGCCTGTCACTTG
GTTCCAGCTTATTGTAGCCATGGGGGAAGACAGAGTCAGGGTTGCCAGAT
CCTTGAAATTTTAAAAAGAGAAGTCAGAAATTCCCACTTCCCAGAAATA

[1259] In some embodiments, the intronic domain that promotes trans-splicing primarily in the muscle comprises or consists of sequences from the gene NOMO2. In some embodiments, the sequences from gene NOMO2 comprise or consist of:

(SEQ ID NO: 1198)
AAAAAAGATACACATCTATAGATAGAGAGATGCATACATATATACATGTA
TACACACAGATACACACATATGTGTATTTTTTGTAGACTTATACAGAATC
ACTTTAGAGGAAGAGTAATTGGAAAGATTGGGTTTAGAAAAATGGACCAT
TTTCTACTGAATATATGGAATGAAAGAGGAAGTGAGTTATTTCCATGTTA
TTGAAAGCTCCATTATTTCAAATAAAGCCTAGAAAGAATAAAATAAAGCT
TTAGCCTTCTTAAATTACAATTTTCCAGAGCATCCCTCAAAATGTATGAG
AAAAGAAATTGATGGCAGCTTATCCCTCCGGCAGGAAGGTGTGGTTTGAA
AGTGGGCCGGCCACACCGAGTTGCCTGGGTCATTGAGGCACAGTTCTCCC
CTGAACTATTTTGCCCCATAATTGTTGGTAAACGGGAAACACTTGGGTCC
TTCAGATAACCATGAGAATATCTCATTCGTGCCTGTTCTTGCCATACTA

[1260] In some embodiments, the intronic domain that promotes trans-splicing primarily in the muscle comprises or consists of sequences from the gene ATP2A1. In some embodiments, the sequences from gene ATP2A1 comprise or consist of:

(SEQ ID NO: 1199)
CTCCCAAAGTGCTGGGGTTACAGGTGTGAGCCACCACGCCTGGCCCAAAG
ACCCCTTTTCCAAGTAAGGTAACATTTACAGGCTCCAGGGATTAGGATCT
GGTATCTTTGCGGACCATTATTGTTTGTTTGTTTAATAGAGACAGAGTCT
CACTCTTGTTGCCCAGGCTGGAGTGTGGTAGCACAATCATAACTCACTGT
AATCTCGAACTCCTGGATTCAAACAATCCTCTTGTCCCAGCCTCCTGGGT
AACTGGTACCACAGGCAATCACCACCACACCCAGCTAATTTTTAAATATT
TTCAGAGGAGTCTCACTGTGTTTTCCAGGCTGGTCTCAAACTCCTGGCCT
CAAGTGATCCTCCCGCCTCAGCCTCCCAAAGTGCTAGGATTATAGGTGTG
CACCAACGTGCCCAGCTGGGGGCTACTATTTAGCCCCTTGCAGGTTCCCT
CACACCCTCCCCTTGCAGGTTCCCTCACACCCTCCCTCCCTCCCCACAG

[1261] In some embodiments, the intronic domain that promotes trans-splicing primarily in the muscle comprises or consists of sequences from the gene ATP2A1. In some embodiments, the sequences from gene ATP2A1 comprise or consist of:

(SEQ ID NO: 1200)
TCAGGAGCAGTGTGGGCAGCGCGCTCAGTCAGAAGGCTGCCTGTGGGGGT
TAAATGGGCCCTCCAAAGATAGAGGTCTCCCTTCATCACTGCTGGCTTCT
CATCTGGGCCTGCAAAATGCTCAAAGGGCAGTAGAACGCCATCCTGTCTG
CCATGAACGGGATCAGAGAGGACCCTTGTGCCCCAGCCAGACAGCTCACT
CTGACCACCATCCACGCACCAGGCACTGCCACACATCGTCTCTCATCCCT
CACAATAGCCCATTCAGAGGATGGTCTCATTATCTTCATTTTTTTAATTA
AAAAAAATTATTATTATTTTGAGACAGAGTCTCACTCTGTCGCCCAGGCT
GGAGTGCAGTGGTGTGATCTTGGCTCACTGCAACCTCTGCCTCCCGGGTT
CAAGCGATTCATCTGCCTCAGCCTCCCTAGTAGCTGGGACTACAGGTGCC
TGCCACCACGCCTGGCTAATTTTTTTGCATTTGTAATAGAGACAGGGTT

[1262] In some embodiments, the intronic domain that promotes trans-splicing primarily in the muscle comprises or consists of sequences from the gene ALDOA. In some embodiments, the sequences from gene ALDOA comprise or consist of:

(SEQ ID NO: 1201)
GGACTCTTGGCCGGCTGGACGGCAGCTCCTCTGGAGGGCCAGAAAAGAGA
GGGGCTAGTGCTCGGGCAGGTGCCCTGGCTTCCCTTCCCCTCCACACGTC
AACGATTCTATTTGAAGTTGGGCAGGGGGGTGGCGCTGCTCACCACACAC
AAGTGTTATAGGAGGAGTCTGGCCCTTGAGTACCGGGTACGCAGGGGTGC
CTCAACCACACTCCGTCCACGGACTCTCCGTTATTTTAGGAGGTGAGTGT
AGTGCCAGTATCTACTCTCCTTCTTAAAAAAAACCAGGGCTCCAGAGAAT
CAGAACAGCCACCATCACCGCAGGGAGTCAAGGGAGGAGGGAGATTAGAG
AAGGAGCCAGGGAGGGTGGCAGGGAGGCCACGTGATCCGAGTCCCCTCAC
CCCTTTCCTTCCCACAGGTCCCTGGCCAAAGATTTATTTCTCTTGACAAC
CAAGGGCCTCCGTCTGGATTTCCAAGGAAGAATTTCCTCTGAAGCACCG

[1263] In some embodiments, the intronic domain that promotes trans-splicing primarily in the muscle comprises or consists of sequences from the gene ALDOA. In some embodiments, the sequences from gene ALDOA comprise or consist of:

TGGGCCCCTTGCAGGACCGGGCCGGGGTGGGGATGGGGTTGGGGTTGGGC
CAACAGGGTCCAGATGGGGTCCAGGTGAGGAGGGGAGATTTGGACGATAG
GAGCAGGGGGCTCAGCATCTGGGAGGCAGATCAGTTCGGGGACGGATTTT
CTTTTGGAGAAGGAAGTCAGGCTCAAGGAAGACGTTTGGCAGGAACTGTG
ACCCCGCATGCCAGAGGCCGAGCAGCGGCCGGTGCATAGCCGCGCATTCT
GGTTTTCTGTGGCGCAGAGGACTACCAGCCTGGCTGCGGCGGCCCGGCGG
AGAGCGCGCACGCATGCGCGACCCAGCCCGGCCTGCCAGCCTGGAACTCG
GATGGGGAGGTCTCGCCTCCGCGCGCCGCTAGTTCCGCCGCCTTCT

(SEQ ID NO: 1202)
CGCGCTCCCTGCGTGTCCTCTCGATGCCCTTTCCTCCGCCTCCCTTACGC
CTGGGCCAGTGACAGGGTGTCGGCTCCGCGCCGATTCAGCCCGCGGGCGA
GGC

[1264] In some embodiments, the intronic domain that promotes trans-splicing primarily in the muscle comprises or consists of sequences from the gene CHRNB1. In some embodiments, the sequences from gene CHRNB1 comprise or consist of:

(SEQ ID NO: 1203)
TCAGCTGGGTTTTAGGTACCCAAAAAGGGCCTGTCTAGATTTTTTCAGAA
AAACGTGGAGTGCTAGGGGCAGCCTGGAAAAGATGGGGAACCTGCTAGTG
AACTAGGAGGGAGACTTCCATAGCCTCAGACTTGGATAGGGTAGGCTGAG
GGGGCCCTAAGGGAGGGACTAAGGCTCCAAGGCAGGTCACTTTTCCTTAG
GCTGTTCTACTTCTGGCTTGTTGCAAGAGGAGTAGATGCCCCCTCACCCA
CACAAACCCCACTCAGTCTCCACCCAACTCCTGGCACTGCTCCCAGGGGA
TCGGGTCTCCACTCCAGCTTTCTCAATTAAAGACGATTTATACAACTGAA
GTGCTGTCTGTCATCTGTCGGTGGCGGGCTTGGCAGTTGCTCGAGGCAGG
ATCAAGTCCCGGGGGCGGGGCGGGTGGGCTGGCGGCTGTCCTCCAGCAAC
AGGTGCACATTCCCGGGCTCCTCGTCACTTCCCCTGTGCTGGCGGTCCC

[1265] In some embodiments, the intronic domain that promotes trans-splicing primarily in the muscle comprises or consists of sequences from the gene CHRNB1. In some embodiments, the sequences from gene CHRNB1 comprise or consist of:

(SEQ ID NO: 1204)
TAAGTGTAGGCCCCGAAGGGGCAGTGACGGGGCCAGCGGTCGTGGCCAGG
CACCAGGGCTGCACTTATTCTCTCCTCCCCCAGGCGTCCGCGGCTCGGAG
GCGGAGGGTCGACTCCGGGAGAAACTTTTCTCTGGCTATGATAGCTCCGT
GCGGCCAGCGCGGGAGGTGGGAGACCGTGTCAGGGTCAGCGTTGGTCTCA
TCCTGGCGCAACTCATCAGCCTGGTGAGGGCGCGCGGGGGGTGGAGGTCA
GGCCAGCCGACCGGCCGGGGGCGTGGCTTTAGGCAAGGCCGGACCAGGGA
CAGGCTGGGGGCGGGGCCTGGGACGAGACCAGGCTGAGATGGACCAGCCT
TTGGTGAAGATTGGATCGAAATCAGACCAATGGACAAGCTCTGGCCGTGG
GTGGTGGACGGGCCTGGAGTAGAACTGGGTAGGGTGAAGGACGGACCTGT
GATCGGACCTTAAAGTGGGGCTGGGGACGAGGCAGGGGCTGGGGGACGG

[1266] In some embodiments, the intronic domain that promotes trans-splicing primarily in the muscle comprises or consists of sequences from the gene DHRS7C. In some embodiments, the sequences from gene DHRS7C comprise or consist of:

(SEQ ID NO: 1205)
GTAAGCTGGCTTTGCTCCCACCTGTGCCCATTTCTGCCCCCAGGGACTGG
CAGGATGGCAGGGTGGCAGGGCGGCAGGGCGCTGTGTGGGCAAACCTGCT
CGGTGGGAGGGGATCGATCCTGTGTTCTCTCCCAGCTTCTATCATTAACC
AGCAAGTTTCCCATCTTTTGGAGGCTGCAGATTCCTGATAAATGAGGGTG
GTGGAATATCTAGGGTTGCAAACTCACAGCCTAAGGGCTAAAACTGGTCT
GCAGATGTGATTTGTTTTGGCTTCATGGGGTTTCCAGAAATTTTGAAAAT
TCAAAGCCTTTAGCTGGGGCAATGTACTGGTTGTGAGCCCAGACTCAGGA
GCTGGGTTCAGTTCCTGGCTCCAGCAATGACTAGCTGGTTACTTCACTTC
TCTGCCTTAAACTTCTCATCTGTAAGGCGAGGATAACAGCAGTCTCTACC
TCATGCTGCCATTGTGAGGAATAAACGAGTTCATAGATGGATAGCACTT

[1267] In some embodiments, the intronic domain that promotes trans-splicing primarily in the muscle comprises or consists of sequences from the gene DHRS7C. In some embodiments, the sequences from gene DHRS7C comprise or consist of:

(SEQ ID NO: 1206)
AGGATGTTTGTGCTGAAAATCCCAGGTTTGGATCCCTCGTGCTCAGTCC
CAAACTGCAGAGGAAACCTCTAATACTCAGGCAAGCCAGGAGAGCTTTG
GCAAGAGCCCTGAAATCAGACCCGGCCAGCATGTGTTCCTGAATATCAG
AATAGACACTATATTTACCCTGACAGCCTTTTAGTGCAACTGAAAGCTA
TAAATAACCATTAGGGCCCAAGCAAGTGGCCTTAACACATGGATTTTCT
TCCAAAAATGCAGACCCATTTTAATTAAGTTTGTAATTAACCACTGGGG
AGGGCAGGCCCCCTGGATTCGGTCTGCTTTCGGAGACACTGTGAGTAAC
TTCCTATTTGTTGAACATTTGGGGATTAGCACGCCCACTGGGTGTTCAG
CTTGGAGGCTTGCACAGAGCTGAGCTCCCTGCAGCCTTGGGCCTCCCCC
TGCCCTGGGAGTCCTGATCAGCGTCTCTTTGCAAAGCCAATCCCCTTTT
ACTCCGTTG

[1268] In some embodiments, the intronic domain that promotes trans-splicing primarily in the muscle comprises or consists of sequences from the gene NPEPPS. In some embodiments, the sequences from gene NPEPPS comprise or consist of:

(SEQ ID NO: 1207)
GTGCTGGGATTACAGGCGTGAGCCACCACGCCTGGCCACAACAAAGAAT
TTTACCAGAAGTGGGTATGATTTATATCTTAGTTTGAATTGCTACTTAC
CTTTGGGGGAACAGACCTTTCCTTGATGTATCTTTAACACTGAAATCTT
GGCAAGTTGCCAAGTCTCAAATGTTCATGAGTAAGACTGCAATATCACA
ATATCATAGTCACACAGGAATCTGATAGAAAAGCATCACATTTATAAAG
CCTTCTTTCCTGTACATCACTGACGTTTTGTGAATTTTAAAGAATTTGT
AATTATTTTTAAGGAGCATATTTAATGTAGATAATGTAGCCTAGAATAG
GCTCATTTGAAATGAAACTCTTGCTAATAGGAACTTAATTCACCAAATT
AAGAATATTTTGCTTTTGTAGAGATTTTGCTCTTGAAAATGTTGCAGTC
TTGATTTCGTCTTGTCAGTCCAGTCAGAATTGTAAAGTAATTTTTTTTC
TCATTCCAG

[1269] In some embodiments, the intronic domain that promotes trans-splicing primarily in the muscle comprises or consists of sequences from the gene NPEPPS. In some embodiments, the sequences from gene NPEPPS comprise or consist of:

(SEQ ID NO: 1208)
TAAGAGACATAGCTTTTGTAAAATCTCGTGATGAATATAGTGACATCTG
ACTTCCTCCAGAGAAATTTATTGTATGCCATTTTTCCCCTCATTGTTAT
TAGCAGATTAAGTATTAAGAGCTTTTTTTTTTTTTTTCCTTTGAGACGG
AGTCTTACTCTATTGCCCAGGCTGGAGAGTAGTGGCATGATCTTGGCTC
ACTACAACCTCCACCTTCCAGGTTCAAGCGATTCTCCTGCGTCGGCCTC
CCGAGTAGCTGGGATTACAGGTGCCTACCACCACACCGGCTAATTTTTT
TGTATTTTTAGTAGAGACAAGGTTTCGCCATGTTGGCCAGGCTGGTCTT
GAACTCCTGATCTCAAGCGATCTGCCCACCCTGGCCTCCCAAAGTGGTA
GGATTACAGGCAGGAGCCACCGCGCCCAGCCGTATTAAGAGCTTTTTAA
AGAGGTTTGTTGCAACTTTTGGGCCACCAGCATTTCCTTCTGCGGAAGT
TGGGCTACG

[1270] In some embodiments, the intronic domain that promotes trans-splicing primarily in the muscle comprises or consists of sequences from the gene KPNB1. In some embodiments, the sequences from gene KPNB1 comprise or consist of:

(SEQ ID NO: 1209)
GGCCTGAGGGCGGCGGTGCAGCGGGAGGGAGAAAGAGGGAGGGAAGGGA
AGTTAGGTTGCGCGGCGCTGCGTGTTCAGCAGGGGTGGGGGCGGGGGAG
TCGGGCCTAGGGGCCATGTGGAAGCTCCGGGCCCGGCCGCCCGCCCTGT
CTGACCCCGGCCGGCTTCTCCTTCCTATCCCGTGGCCCCTGTGGCTCTC
CCCACCTATTTCCTAGAGCTCTGCCCTTTCCTAGCTACCTTGGTCTGTA
CTCATGGCCAGGCCTGGCACCCGACTGCCTCTTAACCCATTTCCACTGA
TATTTTTCCCTCTTTGCTCGGTTATTCCTCTCTTGGGGTTTTTTCTTTT
TCTTTCTTTCTTTTTTTTTTTTCTTCTGACCTGGATGAATAGAGACCTA
ATCACTAGGGATCTGCACCCAGAAAACAGACTGAGGCTCATCTTTGAGA
TGGGGCCTGTTTGCTGATGAAATCACAGGGGAAAGTTCCTCGTTTTTCA
TATTTTAAA

[1271] In some embodiments, the intronic domain that promotes trans-splicing primarily in the muscle comprises or consists of sequences from the gene KPNB1. In some embodiments, the sequences from gene KPNB1 comprise or consist of:

(SEQ ID NO: 1210)
TAATAGGAATTAAGTCTGAGTAACACTAACCATATGTGTTCCTTTGTGT
TATATAGGCAAAATGTCAACATCAACAAAGTGACAAGGCTTATTTTATA
CAGACTGCCTTTGAATGATTTTTTTGTTGTTTTTCATATGTGCCAATTT
TTACAACTAACCTGTTTATCCTTTCCTAGAAGAGATTTTTCCACTAGTA
TAGGCTGATAATTCCATTTAGGGTATTATTCCTGTTTCTGCTTTTGCAA
ATTTTGCAAAAAGCTTTTTATCTTATTCCTAACATTCTTAACATTCTTT
AGTGGTACATAATTAATAAAACTTTTAAGAATTATCTTCTGCTGTGATT
GCAGAGCTTGTTAGCAGTAAGAAAAATGTGTCTGCTTTTGACTTTTCCT
GCTAACTTTGCTGTTTGGGCACGGTTTTTGGTGGAGAGGTGTGTGTGTG
CTAAATTTTTAAACAAAGGGAGTAGTTTTTGAGGCCTGTGGATTACAAA
AGGTTACAA

[1272] In some embodiments, the intronic domain that promotes trans-splicing primarily in the muscle comprises or consists of sequences from the gene SPAG9. In some embodiments, the sequences from gene SPAG9 comprise or consist of:

(SEQ ID NO: 1211)
GTAAGGCTCTTCTCAAGGACAAAAAATATGATATCGTAAGCTGCATCAT
GTTGACTGTGCATTTGTTGCAATCCTCTGCCAAATTTAAATAATGGGGA
ATTATTTAGAGACTTGAAAATGACCTGGATCCCCATTAAATAAGTTTCT
GATTGGCTGGTTTTGTGATTGTAAGAAACTTTACAAAGTGAAGATGAGA
AATTTAGTGCTTGTAGGGTTTGAGTAATATTGTGTATGTATTGAGCTTG
AGTTATGTTTGTGCTAGAAGTACTATGTGTTTACTGTGATTAAAACTTA
CCCTTTTTTGGTGAATCTGCTATTTAATGGAAGTGTCAATTAAAAAAGA
AATAGACCCGAAAGTAGTTGTTTAAATTGAGCTTAATCAGAAAATGTAT
AAAATGTGTGTTAACATGGTAATATGTGTTCCAGTACTTGATTATAATA
AGCTGTTTTTAGAACTGGCATACTAAGCTTCCATTCACATCACACAGCC
ATAACCTTG

[1273] In some embodiments, the intronic domain that promotes trans-splicing primarily in the muscle comprises or consists of sequences from the gene SPAG9. In some embodiments, the sequences from gene SPAG9 comprise or consist of:

(SEQ ID NO: 1212)
TGTTGGCTGTCTAGCACATATTACAGTCCTCTGTCGGTAGACTAAGCTC
TTTGAGGGAGGGATGATATTTTATTTTTCTTAGTAGAATTAAAGTCAAT
CTTTAGCAGATTGACTGACACATGGTAGGTCAAAGTAACTACAGTATTT
ATTGAACTTAATTGTTGACTCCCCTCTGTGTATCCCATGAACTTCTTGG
GTCTCTTGTTCTTCAGAAAGAAAGGTAGAATACCTCACTGATAAATGTT
TCTTTTCTTTTCTTTTTGAATGTAGGGCATCACGAGAAAATCCAGCCAT
GCAGGAAAAAAAAAGGTCAAGCATTTGGCAGTTGTAAGTATTGAAAAAC
AAAGATGTTAGACAGCACATGAGACAAGAAAATTACAGTCAAAATTTAT
TTCCAAGAATGATTTTATGTCCATTTTCTTTCCTTCATTTTTTTTTTTT
AAACTAGGGGTAATGGTTAAGTAGCTAAACTGAACTTTTTTTTTTTTTT
TAATATATA

[1274] In some embodiments, the intronic domain that promotes trans-splicing primarily in the muscle comprises or consists of sequences from the gene MAFG. In some embodiments, the sequences from gene MAFG comprise or consist of:

(SEQ ID NO: 1213)
GTATTGGGGGCTGGGCACCTGGACAGCAGGCTGGGGCGGGCTGTGCGGC
AAGGGCTCTTGTGAACTGGGCCGGGGGCGGGGGGGGGGGGGTGCGGCGA
GGGTGGTCTCCAGGGTACTGACCTGCTCCGTGTCTTGCAGAGAGCGCCT
GCTCGCTGTGCCCCCGGGTTATGACGACCCCCAATAAAGGAAACAAGGC
CTTGAAGGTGAGTGGGCAGGGACAGGAGCCTGTGGGCTGGGGTCGGGGG
GCACAGTGGGCGTGCCCGCTTGGCCTGTGACCACCTGCACTGTGCCCCA
GGTGAAGCGGGAGCCGGGTGAGAATGGCACCAGCCTGACGGATGAGGAG
CTGGTGACCATGTCGGTGCGGGAGCTGAACCAGCACCTGCGGGGCCTGT
CCAAGGAGGAGATCGTCCAGCTGAAGCAGCGCCGGCGCACGCTCAAGAA
CCGCGGCTACGCTGCCAGCTGCCGCGTGAAGCGGGTGACGCAGAAGGAG
GAGCTGGAG

[1275] In some embodiments, the intronic domain that promotes trans-splicing primarily in the muscle comprises or consists of sequences from the gene MAFG. In some embodiments, the sequences from gene MAFG comprise or consist of:

(SEQ ID NO: 1214)
AAGCCACAGGATGGTTACTCCATCAGTGGAGGAGGCCGACTGGGAGGTC
TAGAGGGGCCTCGGGCCAGGCTCCTCCCAGCTGATGGCCTGCCACCTGG
AAGGTGGGGGAACTCCCTGGTCAGTCCTGCCAACAGACCAGAGCTAGAT
GGACGGCCCACCCCCAGCTTTTCAAAGTTAGGAGGCTGGGAGACTCGGG
GTTCCCTGTAGCCTCCTCTCTGGCCAGGTCCCCCGTGGGGCCCCTGTGC
ACCCAGGGAGCAGGGGGCTTTGTCCGAGGCCGGCTCAGGGGAGGTGGCT
GTAGAAGGTAGGACCCTGGAAGATGCACACACAGGGTCACTGGCTGGCC
CTCACCTGCTATTGGCCAGGCTGGGGGCTGCGGCTCTCGTGGGGCGCTG
TTGGCTGGCGGGCCAGGGAGTGCGGGCGCGGCGGGGAGGCAGAGGCAAT
GTGCTGAGTCAGCGTGACTCGCCAGGAACAGCCGCGCTCTGGGCAGTGC
CGGGGTTAT

[1276] In some embodiments, the intronic domain that promotes trans-splicing primarily in the muscle comprises or consists of sequences from the gene RYR1. In some embodiments, the sequences from gene RYR1 comprise or consist of:

(SEQ ID NO: 1215)
GTCTGTGAAGCAGAGGTCAGAGGTGTTTGAAGGAAAAGGCAGGAGCGAG
GACTGTGTGATGGTGGAGGCAGGAGGTGGGGCTTCCTTTGGGGTTGGAG
GGATGTGGGGTCATCTGCAGAGGAGGACACAGAACAGGAGATTCCTGTC
CTTGGAGCAGGGTCAGTGTGTCTCAGGGGAGAGGCATGGGGGTGAGGCT
TCCTATGAGATTAGGTGGAACACGGGTTAGTGGGGAGGGTTAGGGTTAG
GGAAGTTTCTATGGAGTCTGGGTGGGTCTGAGGTGTTTGAGGGAGGAGG
CACAGAAGAGGTGTTTTCGTGATGTTGGTCTAGATTCAGTGTGTCTGAG
GGGGATGGCAGAGGGCAGGGCCTTCCTGTGGGGTGGGGGTGGGGTCTGG
CGTCTCAAGAGTGTGGGCATCCAGACTAGGGGAGGGAGTGTGGCAGGGA
ATGTTGCTGGGGTGGGGGGGTCTTCTGACCCCTCACTTACATCCCCCTC
CCACCCCAG

[1277] In some embodiments, the intronic domain that promotes trans-splicing primarily in the muscle comprises or consists of sequences from the gene RYR1. In some embodiments, the sequences from gene RYR1 comprise or consist of:

(SEQ ID NO: 1216)
TGAGGACCCCACCTGGGGGTGGGCGGGGTGGCAGAGATGGGCGAGAGGA
CCCAGGGGTCGTTTAGGGCACGGTGGCAAGGATGGGTGAGAGGACCCGG
GGGTCGCTTACCATCTGCTCTTCTTCCTCTCTCTGCCCTGCCCCCCACA
GGCCCTCAATTTGGATAAGTGGGTAGGTCCGGCCTTGGATGTCACCTGT
CCTTCCACCCCTCCTGACCCCAGGCAGGCCCGTCTCTCAGGCCCACGCC
CTGCACACAGGGGCTGGAGGGTCCTCCCCCACCCCAGTTGTCAGGGGCT
GTGGAGCCCAGAACAGGCCAGGCAGGAAGGAAGGAAGGGGATGGGGGCT
TCTGAGCCCCTGTCCCCGACGCCTGCTCCTTTCTCCTCTTTCCAGTCCT
TTCCCCCAACCCTGATCCCAGCTCCTCTCCGCATGGGACCTCTCCCACC
TCCCCCATCCCAAGCGTGAGTCCCTCTGGTCCAGGAGTGGGTCCACCAT
GTGATCACC

[1278] In some embodiments, the intronic domain that promotes trans-splicing primarily in the muscle comprises or consists of sequences from the gene MYLK2. In some embodiments, the sequences from gene MYLK2 comprise or consist of:

(SEQ ID NO: 1217)
TGAATATCCCCTCCTGGGAGTGGGGAGGGGTCCTGTGGTTCTGTCCCTA
GGGGTCCTGCTTAATTCCCTTGTCTTAGGCATGGTTATCATCACATTCA
GTGCTGGGGAGTGTAGTTCTGACATTCAGTTTCCTCTGTCCTGTGAATT
GCCTCTACCGCCTTGTCCCCTGCAGAAACCAGAACCCTGCCACAATTCA
TACAAGACTGGAGTAAGAGAGACCCTCAAAGACTGCCTAGGTTGAACAT
ATCTTCTCTAGGCTTCTGGGGTCCGAAGTTCCCCTTACTCCATGGGCTT
GGGTCTAGCCAAGGGCAGGGTTGAGATGGCAGGCAGAAAGGCTAAAGGT
GTCAGGCAAAAGGCTGTGTATTTCCTAGGACATCCAGTATTTTCCTGTT
CTTCTTAATATAATTATTGGTAAGATATGAAAAGATGACTAATAACCAG
ATTGGAGGATCATTGATAATATTTTCATAACCATAATATAGCACATGTG
TGATGCCAT

[1279] In some embodiments, the intronic domain that promotes trans-splicing primarily in the muscle comprises or consists of sequences from the gene MYLK2. In some embodiments, the sequences from gene MYLK2 comprise or consist of:

(SEQ ID NO: 1218)
CAACAGGTGCCAAGCTGGGGCAGGAGATGGAGGGAGGAGCTTGGGAAGG
GGGGTTTTGAATCCAGGACTGGGCAGGTTCCTCAGTGGGAGTTCTGTGC
CCCAGCCTTGTTTGCATGGTGCACGGGGGACCCAGAAATCAGAGGAATC
TCTGGCTAGGGTTGGGCTGGGTCCAGGGCCTGTATGAAGCCCTTCCTGG
AGAGACCAGGAAAATGTGAAGCCACCAGGGATGGCTGCTGGGGATGCAC
CTAAACAGTCAGGGCAAGGATGATGGGGGCCACCAAGGCCCACCCAAAG
GGCTGGAAGCCTCCCACAGAGGCCCTCCAAGGTCGTGGCAGCTCATCTC
TAGGGGCCATCAAGTGGCCCCAGAGACTCAGTGGGACAAGCATTTGCAA
GTTGTTGCCTGGGTGGGAACCTGGGCCCAGAGCTGGTCTCTGCCCAGCC
TGGGTGAGAGGGAAGGAAAGGAGGGTGGATCCTGATGGGTGTCTCACCT
CCTCTGCAG

[1280] In some embodiments, the intronic domain that promotes trans-splicing primarily in the muscle comprises or consists of sequences from the gene CLTCL1. In some embodiments, the sequences from gene CLTCL1 comprise or consist of:

(SEQ ID NO: 1219)
GTAAACCCGATGGGATTGTTAGAAAGGAATCTTACCTCATTTTAACTGC
TTTGTTACCTTAAATATTGAACAAGTGTCACTAAGCTCATGGCGAAGTG
CTCCTCAATAGTATTCCACTTAATTCCAAAAGTTTTAGCAAAAGTTATG
TTTAGTGTGCCCTAGTAAGAGGCCCCTGAGCACCAGAGCTTCTTGGTAA
CATCACCCACAGCGCCAGACACACCGAGAGGAAGAAAATGCCCAGGCCT
TTGTCTTCATGCGACTAGGAACGCACAACAGCACTGTGCATGTTTCCCA
GGAAGGCTGTGTGGCCCCCTTGCCTGAGGGCCTGCTGCAGTGGTGCTTC
CGGTCATCCGACGACACAGGCTCGGGGGTTTTCCTCCTGTGAAACACAT
CAATGATAGAGGAGCTGATAATTAATAGAATTTTACTTCCTTGAAATCA
GGGAGTCTTGGGTGCTTAAAGCCTTCTAGTTATCTTGAAAAATATAGAA
TCTTCTTAT

[1281] In some embodiments, the intronic domain that promotes trans-splicing primarily in the muscle comprises or consists of sequences from the gene CLTCL1. In some embodiments, the sequences from gene CLTCL1 comprise or consist of:

(SEQ ID NO: 1220)
TTGATGATATCTAGGGAAATGTTTAAGCAAAAACTTTTGGCCAGTTCTT
TTTTCTTGCCTTTTGGAGAAATCAGGTTTTGTGTTTCCTCCCTTTTTCC
CTTCCACTTCCCTCGCCTTCACCTCTCCAAGACCTCCTTCCTCCCAAAG
CTCTCCTCGGTGGTGGGCTTATCTGTGACACCTTATCTGATGGTGTTCT
TTGGGAGTTCACCCCCAACTCATCTCCTCCTGTCTGTATCACTTGTGGC
GTCCTTGACACTGCCTAGTGTCATCCTGCACATGTCTTATCTCCACTGT
GGGCTGGTAATCTCTCAAGGAGAGTTGATTCACAGGCTTGGGTGGATCT
ATTACAGGCGTAGAAAAGCAAGCTAATGTTTCCTTCAAGTGTTTACCTA
ATGTTAACTTTTTTCTAAATTTTATTTAACTTCTCCTCTTTTGCCTTTG
GCTACAGTCAGTCCATTTCAGAGGAAAAAAATTTAATCAAATGCTTTTT
TTCTGTTTA

[1282] Replacement domains

[1283] Compositions comprising replacement domains disclosed herein include any strategies where replacement or insertion of RNA sequences could be an effective therapy. Exemplary replacement domains include without limitation sequences derived or isolated from the following genes (with gene accession IDs in brackets and associated diseases in parentheses) such as TNFRSF13B [ENSG00000240505] (common variable immune deficiency); ADA, CECR1 [ENSG00000196839, ENSG00000093072] (Adenosine deaminase deficiency); IL2RG [ENSG00000147168] (X-linked severe combined immunodeficiency); HBB [ENSG00000244734] (Beta-thassalemia); HBA1, HBA2 [ENSG00000206172, ENSG00000188536] (alpha-thassalemia); U2AF1 [ENSG00000160201] (myelodysplastic syndrome); SOD1, TARDBP, FUS, MATR3, SOD1, C9ORF72 [ENSG00000142168, ENSG00000120948, ENSG00000089280, ENSG00000015479, ENSG00000142168, ENSG00000147894] (Amyotrophic lateral sclerosis); MAPT, PGRN [ENSG00000186868, ENSG00000030582] (Frontotemporal dementia with parkinsonism); CDH23, MYO7A, USH2A [ENSG00000107736, ENSG00000137474, ENSG00000042781] (Usher's syndrome); GALC [ENSG00000054983] (Krabbe disease); SMPD1, NPC1, NPC2 [ENSG00000166311, ENSG00000141458, ENSG00000119655] (Niemann Pick disease); PRNP [ENSG00000171867] (prion disease); SCN1A [ENSG00000144285] (Dravet syndrome); PINK1, ATPGAP2 [ENSG00000158828] (early-onset Parkinson's disease); ATXN1, ATXN2, ATXN3, PLEKHG4, SPTBN2, CACNA1A, ATXN7, TTBK2, PPP2R2B, KCNC3, PRKCG, ITPR1, TBP, KCND1, FGF14 [ENSG00000124788, ENSG00000204842, ENSG00000066427, ENSG00000196155, ENSG00000173898, ENSG00000141837, ENSG00000163635, ENSG00000128881, ENSG00000156475, ENSG00000131398, ENSG00000126583, ENSG00000150995, ENSG00000112592, ENSG00000102057, ENSG00000102466] (spinocerebellar ataxias); SCN1A, SCN2A, CACNA1A, GRIN2B, GRIN2A, MECP2, FOXG1, SLC6A1, PRRT2, PTEN, KCNQ2, KCNQ3, STARD7, CLRN1 [ENSG00000144285, ENSG00000136531, ENSG00000141837, ENSG00000273079, ENSG00000183454, ENSG00000169057, ENSG00000176165, ENSG00000157103, ENSG00000167371, ENSG00000171862, ENSG00000075043, ENSG00000184156, ENSG00000084090, ENSG00000163646] (genetic epilepsy disorders); ATM [ENSG00000149311] (Ataxia-telangiectasia); GLB1 [ENSG00000170266] (GM1 gangliosidosis); GBA [ENSG00000177628] (Gaucher disease); GM2A [ENSG00000196743] (GM2 gangliosidosis); UBE3A [ENSG00000114062] (Angelman syndrome); SLC2A1 [ENSG00000117394] (glucose transporter deficiency type 1); LAM P2 [ENSG00000005893] (Danon disease); GLA [ENSG00000102393] (Fabry disease); PKD1, PKD2 [ENSG00000008710, ENSG00000118762] (Autosomal dominant polycystic kidney disease); GAA [ENSG00000171298] (Pompe disease); PCSK9, LDLR, APOB, APOE [ENSG00000169174, ENSG00000130164, ENSG00000084674, ENSG00000130203] (Familial hypercholesterolemia); MYOC, OPTN, TBK1, WDR36, CYPIB1 [ENSG00000034971, ENSG00000123240, ENSG00000183735, ENSG00000134987, ENSG00000138061] (Open Angle Glaucoma); IDUA [ENSG00000127415] (Hurler syndrome or Mucopolysaccharidosis 1); IDS [ENSG00000010404] (Hunter syndrome or Mucopolysaccharidosis 2); CLN3 [ENSG00000188603] (Batten disease); DMD [ENSG00000198947] (Duchenne muscular dystrophy); LMNA [ENSG00000160789] (Limb-girdle muscular dystrophy type 1B); DYSF [ENSG00000135636] (Limb-girdle muscular dystrophy type 2B); SGCA [ENSG00000108823] (Limb-girdle muscular dystrophy type 2D); SGCB [ENSG00000163069] (Limb-girdle muscular dystrophy type 2E); SGCG [ENSG00000102683] (Limb-girdle muscular dystrophy type 2C); SGCD [ENSG00000170624] (Limb-girdle muscular dystrophy type 2F); DUX4 [ENSG00000260596] (Facioscapulohumeral muscular dystrophy); F9 [ENSG00000101981] (Hemophilia B); F8 [ENSG00000185010] (Hemophilia A); USHA2A, RPGR, RP2, RHO, PRPF31, USH1F, PRPF3, PRPF6 [ENSG00000156313, ENSG00000102218, ENSG00000163914, ENSG00000105618, ENSG00000150275, ENSG00000117360, ENSG00000101161] (Retinitis pigmentosa); CFTR [ENSG00000001626] (cystic fibrosis); GJB2, GJB6, STRC, DFNA1, WFS1 [ENSG00000165474, ENSG00000121742, ENSG00000242866, ENSG00000131504, ENSG00000109501] (autosomal dominant hearing impairment); POU3F3 [ENSG00000198914] (nonsyndromic hearing loss).

[1284] In some embodiments, the replacement domain is codon optimized.

[1285] In addition to sequences derived from human genes, Replacement Domains can comprise sequences derived from other organisms in order to alter the stability, translation, processing, or localization of a target RNA. Exemplary replacement domains derived from non-human sources include without limitation sequences that increase protein production such as those derived or isolated from Woodchuck Hepatitis Virus (WHV) Post-transcriptional Regulatory Element (WPRE), triplex from MALAT1, the PRE of Hepatitis B virus (HPRE), and an iron response element of the form CAGYCX (Y=U or A; X=U, C, or A).

### Antisense Domains

[1286] In some embodiments of the compositions of the disclosure, a pathogenic RNA molecule is a target RNA. In some embodiments, the target RNA comprises a target sequence that is complementary to an antisense domain of the trans-splicing RNA of the disclosure.

[1287] In some embodiments of the compositions and methods of the disclosure, the target sequence comprises or consists of between 5 and 500 nucleotides. In some embodiments, the target sequence comprises or consists of between 50 and 250 nucleotides. In some embodiments, the target sequence comprises or consists of between 5 and 50 nucleotides.

[1288] In some embodiments of the compositions and methods of the disclosure, a target sequence is contained within a single contiguous stretch of the target RNA. In some embodiments, the target sequence may consist of comprise of one or more nucleotides that are not spread among a single contiguous stretch of the target RNA.

[1289] In some embodiments of the disclosure, a antisense domain of the disclosure binds to a target sequence. In some embodiments of the disclosure, a antisense domain of the disclosure binds to a target RNA.

### Vectors

[1290] In some embodiments of the compositions and methods of the disclosure, a vector comprises a trans-splicing nucleic acid of the disclosure. In some embodiments, the vector comprises at least one trans-splicing nucleic acid of the disclosure. In some embodiments, the vector comprises one or more trans-splicing nucleic acid(s) of the disclosure. In some embodiments, the vector comprises two or more trans-splicing nucleic acids of the disclosure.

[1291] In some embodiments of the compositions and methods of the disclosure, a vector of the disclosure is a viral vector. In some embodiments, the viral vector comprises a sequence isolated or derived from a retrovirus. In some embodiments, the viral vector comprises a sequence isolated or derived from a lentivirus. In some embodiments, the viral vector comprises a sequence isolated or derived from an adenovirus. In some embodiments, the viral vector comprises a sequence isolated or derived from an adeno-associated virus (AAV). In some embodiments, the viral vector is replication incompetent. In some embodiments, the viral vector is isolated or recombinant. In some embodiments, the viral vector is self-complementary.

[1292] In some embodiments of the compositions and methods of the disclosure, the viral vector comprises a sequence isolated or derived from an adeno-associated virus (AAV). In some embodiments, the viral vector comprises an inverted terminal repeat sequence or a capsid sequence that is isolated or derived from an AAV of serotype AAV1, AAV2, AAV3, AAV4, AAV5, AAV6, AAV7, AAV8, AAV9, AAV10, AAV11 or AAV12. In some embodiments, the viral vector is replication incompetent. In some embodiments, the viral vector is isolated or recombinant (rAAV). In some embodiments, the viral vector is self-complementary (scAAV).

[1293] In some embodiments of the compositions and methods of the disclosure, a vector of the disclosure is a non-viral vector. In some embodiments, the vector comprises or consists of a nanoparticle, a micelle, a liposome or lipoplex, a polymersome, a polyplex or a dendrimer.

[1294] In some embodiments, the vector is an expression vector or recombinant expression system. As used herein, the term“recombinant expression system” refers to a genetic construct for the expression of certain genetic material formed by recombination.

[1295] In some embodiments, the liposome, lipoplex, or nanoparticle can further comprise a non-cationic lipid, a PEG conjugated lipid, a sterol, or any combination thereof.

[1296] In some embodiments, the the liposome, lipoplex, or nanoparticle further comprises a non-cationic lipid, wherein the non-ionic lipid is selected from the group consisting of distearoyl-sn-glycero-phosphoethanolamine, distearoylphosphatidylcholine (DSPC), dioleoylphosphatidylcholine (DOPC), dipalmitoylphosphatidylcholine (DPPC), dioleoylphosphatidylglycerol (DOPG), dipalmitoylphosphatidylglycerol (DPPG), dioleoyl-phosphatidylethanolamine (DOPE), palmitoyloleoylphosphatidylcholine (POPC), palmitoyloleoylphosphatidylethanolamine (POPE), dioleoyl-phosphatidylethanolamine 4-(N-maleimidomethyl)-cyclohexane-1-carboxylate (DOPE-mal), dipalmitoyl phosphatidyl ethanolamine (DPPE), dimyristoylphosphoethanolamine (DMPE), distearoyl-phosphatidyl-ethanolamine (DSPE), monomethyl-phosphatidylethanolamine (such as 16-O-monomethyl PE), dimethyl-phosphatidylethanolamine (such as 16-O-dimethyl PE), 18-1-trans PE, I-stearoyl-2-oleoyl-phosphatidyethanolamine (SOPE), hydrogenated soy phosphatidylcholine (HSPC), egg phosphatidylcholine (EPC), dioleoylphosphatidylserine (DOPS), sphingomyelin (SM), dimyristoyl phosphatidylcholine (DMPC), dimyristoyl phosphatidylglycerol (DMPG), distearoylphosphatidylglycerol (DSPG), dierucoylphosphatidylcholine (DEPC), palmitoyloleyolphosphatidylglycerol (POPG), dielaidoyl-phosphatidylethanolamine (DEPE), lecithin, phosphatidylethanolamine, lysolecithin, lysophosphatidylethanolamine, phosphatidylserine, phosphatidylinositol, sphingomyelin, egg sphingomyelin (ESM), cephalin, cardiolipin, phosphatidicacid, cerebrosides, dicetylphosphate, lysophosphatidylcholine, dilinoleoylphosphatidylcholine and non-cationic lipids described, for example, in WO2017/099823 or US2018/0028664.

[1297] In some embodiments, the liposome, lipoplex, or nanoparticle further comprises a conjugated lipid, wherein the conjugated lipid, wherein the conjugated-lipid is selected from the group consisting of PEG-diacylglycerol (DAG) (such as I-(monomethoxy-polyethyleneglycol)-2,3-dimyristoylglycerol (PEG-DMG)), PEG-dialkyloxypropyl (DAA), PEG-phospholipid, PEG-ceramide (Cer), a pegylated phosphatidylethanoloamine (PEG-PE), PEG succinate diacylglycerol (PEGS-DAG) (such as 4-O-(2′,3′-di(tetradecanoyloxy)propyl-1-O-(w-methoxy(polyethoxy)ethyl) butanedioate (PEG-S-DMG)), PEG dialkoxypropylcarbam, N-(carbonyl-methoxypoly ethylene glycol 2000)-1,2-distearoyl-sn-glycero-3-phosphoethanolamine sodium salt.

[1298] In some embodiments, the liposome, lipoplex, or nanoparticle further comprises cholesterol or a cholesterol derivative.

[1299] In some embodiments, the liposome, lipoplex, or nanoparticle further comprises an ionizable lipid, a non-cationic lipid, a conjugated lipid that inhibits aggregation of particles, and a sterol. The amount of the ionizable lipid, the non-cationic lipid, the conjugated lipid that inhibits aggregation of particles, and the sterol can be varied independently. In some embodiments, the lipid nanoparticle comprises an ionizable lipid in an amount from about 20 mol % to about 90 mol % of the total lipid present in the particle, a non-cationic lipid in an amount from about 5 mol % to about 30 mol % of the total lipid present in the particle, a conjugated lipid that inhibits aggregation of particles in an amount from about 0.5 mol % to about 20 mol % of the total lipid present in the particle, and a sterol in an amount from about 20 mol % to about 50 mol % of the total lipid present in the particle.

[1300] The ratio of total lipid to DNA vector can be varied as desired. For example, the total lipid to DNA vector (mass or weight) ratio can be from about 10:1 to about 30:1.

[1301] In some embodiments of the compositions and methods of the disclosure, an expression vector, viral vector or non-viral vector provided herein, includes without limitation, an expression control element. An“expression control element” as used herein refers to any sequence that regulates the expression of a coding sequence, such as a gene. Exemplary expression control elements include but are not limited to promoters, enhancers, microRNAs, post-transcriptional regulatory elements, polyadenylation signal sequences, and introns. Expression control elements may be constitutive, inducible, repressible, or tissue-specific, for example. A “promoter” is a control sequence that is a region of a polynucleotide sequence at which initiation and rate of transcription are controlled. It may contain genetic elements at which regulatory proteins and molecules may bind such as RNA polymerase and other transcription factors. In some embodiments, expression control by a promoter is tissue-specific. Non-limiting exemplary promoters include CMV, CBA, CAG, Cbh, EF-1a, PGK, UBC, GUSB, UCOE, hAAT, TBG, Desmin, MCK, C5-12, NSE, Synapsin, PDGF, MecP2, CaMKII, mGluR2, NFL, NFH, n132, PPE, ENK, EAAT2, GFAP, MBP, and U6 promoters. An“enhancer” is a region of DNA that can be bound by activating proteins to increase the likelihood or frequency of transcription. Non-limiting exemplary enhancers and posttranscriptional regulatory elements include the CMV enhancer and WPRE.

### Nucleic Acids

[1302] Provided herein are the nucleic acid sequences encoding the trans-splicing nucleic acids disclosed herein for use in gene transfer and expression techniques described herein. It should be understood, although not always explicitly stated that the sequences provided herein can be used to provide the expression product as well as substantially identical sequences that produce a protein that has the same biological properties. These“biologically equivalent” or“biologically active” or“equivalent” polypeptides are encoded by equivalent polynucleotides as described herein. They may possess at least 60%, or alternatively, at least 65%, or alternatively, at least 70%, or alternatively, at least 75%, or alternatively, at least 80%, or alternatively at least 85%, or alternatively at least 90%, or alternatively at least 95% or alternatively at least 98%, identical nucleic acid sequence to the reference nucleic acid sequence when compared using sequence identity methods run under default conditions. Specific sequences are provided as examples of particular embodiments. Additionally, an equivalent polynucleotide is one that hybridizes under stringent conditions to the reference polynucleotide or its complement.

[1303] The nucleic acid sequences (e.g., polynucleotide sequences) disclosed herein may be codon-optimized which is a technique well known in the art. Codon optimization refers to the fact that different cells differ in their usage of particular codons. This codon bias corresponds to a bias in the relative abundance of particular tRNAs in the cell type. By altering the codons in the sequence to match with the relative abundance of corresponding tRNAs, it is possible to increase expression. It is also possible to decrease expression by deliberately choosing codons for which the corresponding tRNAs are known to be rare in a particular cell type. Codon usage tables are known in the art for mammalian cells, as well as for a variety of other organisms. Based on the genetic code, nucleic acid sequences coding for various replacement domains can be generated. In some embodiments, such a sequence is optimized for expression in a host or target cell, such as a host cell used to express the trans-splicing RNA containing a replacement domain in which the disclosed methods are practiced (such as in a mammalian cell, e.g., a human cell). Codon preferences and codon usage tables for a particular species can be used to engineer isolated nucleic acid molecules encoding a replacement domain (such as one encoding a protein having at least 80%, at least 85%, at least 90%, at least 92%, at least 95%, at least 96%, at least 97%, at least 98%, at least 99%, or 100% sequence identity to its corresponding wild-type protein) that takes advantage of the codon usage preferences of that particular species. For example, the replacement domains disclosed herein can be designed to have codons that are preferentially used by a particular organism of interest. In one example, a replacement domain nucleic acid sequence is optimized for expression in human cells, such as one having at least 70%, at least 80%, at least 85%, at least 90%, at least 92%, at least 95%, at least 98%, or at least 99% sequence identity to its corresponding wild-type or originating nucleic acid sequence. In some embodiments, an isolated trans-splicing nucleic acid molecule encoding at least one replacement domain (which can be part of a vector) includes at least one replacement domain coding sequence that is codon optimized for expression in a eukaryotic cell, or at least one replacement domain coding sequence codon optimized for expression in a human cell. In one embodiment, such a codon optimized replacement domain coding sequence has at least 80%, at least 85%, at least 90%, at least 92%, at least 95%, at least 96%, at least 97%, at least 98%, at least 99%, or 100% sequence identity to its corresponding wild-type or originating sequence. In another embodiment, a eukaryotic cell codon optimized nucleic acid sequence encodes a replacement domain having at least 85%, at least 90%, at least 92%, at least 95%, at least 96%, at least 97%, at least 98%, at least 99%, or 100% sequence identity to its corresponding wild-type or originating protein. In another embodiment, a variety of clones containing functionally equivalent nucleic acids may be routinely generated, such as nucleic acids which differ in sequence but which encode the same replacement domain protein sequence. Silent mutations in the coding sequence result from the degeneracy (i.e., redundancy) of the genetic code, whereby more than one codon can encode the same amino acid residue. Thus, for example, leucine can be encoded by CTT, CTC, CTA, CTG, TTA, or TTG; serine can be encoded by TCT, TCC, TCA, TCG, AGT, or AGC; asparagine can be encoded by AAT or AAC; aspartic acid can be encoded by GAT or GAC; cysteine can be encoded by TGT or TGC; alanine can be encoded by GCT, GCC, GCA, or GCG; glutamine can be encoded by CAA or CAG; tyrosine can be encoded by TAT or TAC; and isoleucine can be encoded by ATT, ATC, or ATA. Tables showing the standard genetic code can be found in various sources (see, for example, Stryer, 1988, Biochemistry, 3.sup.rd Edition, W.H.5 Freeman and Co., NY).

[1304] “Hybridization” refers to a reaction in which one or more polynucleotides react to form a complex that is stabilized via hydrogen bonding between the bases of the nucleotide residues. The hydrogen bonding may occur by Watson-Crick base pairing, Hoogstein binding, or in any other sequence-specific manner. The complex may comprise two strands forming a duplex structure, three or more strands forming a multi-stranded complex, a single self-hybridizing strand, or any combination of these. A hybridization reaction may constitute a step in a more extensive process, such as the initiation of a PC reaction, or the enzymatic cleavage of a polynucleotide by a ribozyme.

[1305] Examples of stringent hybridization conditions include: incubation temperatures of about 25° C. to about 37° C.; hybridization buffer concentrations of about 6×SSC to about 10×SSC; formamide concentrations of about 0% to about 25%; and wash solutions from about 4×SSC to about 8×SSC. Examples of moderate hybridization conditions include: incubation temperatures of about 40° C. to about 50° C.; buffer concentrations of about 9×SSC to about 2×SSC; formamide concentrations of about 30% to about 50%; and wash solutions of about 5×SSC to about 2×SSC. Examples of high stringency conditions include: incubation temperatures of about 55° C. to about 68° C.; buffer concentrations of about 1×SSC to about 0.1×SSC;

[1306] “Homology” or “identity” or “similarity” refers to sequence similarity between two peptides or between two nucleic acid molecules. Homology can be determined by comparing a position in each sequence which may be aligned for purposes of comparison. When a position in the compared sequence is occupied by the same base or amino acid, then the molecules are homologous at that position. A degree of homology between sequences is a function of the number of matching or homologous positions shared by the sequences. An “unrelated” or “non-homologous” sequence shares less than 40% identity, or alternatively less than 25% identity, with one of the sequences of the present invention.

### Methods of Use

[1307] The disclosure provides a method of modifying the composition of a target RNA of the disclosure primarily in a specific tissue comprising contacting the composition and the target RNA under conditions suitable for trans-splicing among the composition and the target RNA.

[1308] The disclosure provides a method of modifying the composition of a target RNA of the disclosure primarily in a specific tissue comprising contacting the composition and a cell comprising the target RNA under conditions suitable for trans-splicing among the composition and the target RNA.

[1309] The disclosure provides a method of modifying the composition of a protein encoded by a target RNA of the disclosure primarily in a specific tissue comprising contacting the composition and the target RNA under conditions suitable for trans-splicing among the composition and the target RNA.

[1310] The disclosure provides a method of modifying the composition of a protein encoded by a target RNA of the disclosure primarily in a specific tissue comprising contacting the composition and a cell comprising the target RNA under conditions suitable for trans-splicing among the composition and the target RNA.

[1311] The disclosure provides a method of modifying the composition of a target RNA of the disclosure primarily in liver tissue comprising contacting the composition and a liver cell comprising the target RNA under conditions suitable for trans-splicing among the composition and the target RNA.

[1312] The disclosure provides a method of modifying the composition of a protein encoded by a target RNA of the disclosure primarily in liver tissue comprising contacting the composition and a liver cell comprising the target RNA under conditions suitable for trans-splicing among the composition and the target RNA.

[1313] The disclosure provides a method of modifying the composition of a target RNA of the disclosure primarily in muscle tissue comprising contacting the composition and a muscle cell comprising the target RNA under conditions suitable for trans-splicing among the composition and the target RNA.

[1314] The disclosure provides a method of modifying the composition of a protein encoded by a target RNA of the disclosure primarily in muscle tissue comprising contacting the composition and a muscle cell comprising the target RNA under conditions suitable for trans-splicing among the composition and the target RNA.

[1315] The disclosure provides a method of modifying the composition of a target RNA of the disclosure primarily in brain tissue comprising contacting the composition and a brain cell comprising the target RNA under conditions suitable for trans-splicing among the composition and the target RNA.

[1316] The disclosure provides a method of modifying the composition of a protein encoded by a target RNA of the disclosure primarily in brain tissue comprising contacting the composition and a brain cell comprising the target RNA under conditions suitable for trans-splicing among the composition and the target RNA.

[1317] The disclosure provides a method of modifying the composition of a target RNA of the disclosure primarily in heart tissue comprising contacting the composition and a heart cell comprising the target RNA under conditions suitable for trans-splicing among the composition and the target RNA.

[1318] The disclosure provides a method of modifying the composition of a protein encoded by a target RNA of the disclosure primarily in heart tissue comprising contacting the composition and a heart cell comprising the target RNA under conditions suitable for trans-splicing among the composition and the target RNA.

[1319] The disclosure provides a method of modifying the composition of a target RNA of the disclosure primarily in retina tissue comprising contacting the composition and a retina cell comprising the target RNA under conditions suitable for trans-splicing among the composition and the target RNA.

[1320] The disclosure provides a method of modifying the composition of a protein encoded by a target RNA of the disclosure primarily in retina tissue comprising contacting the composition and a retina cell comprising the target RNA under conditions suitable for trans-splicing among the composition and the target RNA.

[1321] The disclosure provides a method of modifying the composition of a target RNA of the disclosure primarily in a specific tissue comprising contacting the composition and a cell comprising the target RNA under conditions suitable for trans-splicing among the composition and the target RNA. In some embodiments, the cell is in vivo, in vitro, ex vivo or in situ. In some embodiments, the composition comprises a vector comprising composition comprising a guide RNA of the disclosure and a fusion protein of the disclosure. In some embodiments, the vector is an AAV.

[1322] The disclosure provides a method of modifying the composition of a protein encoded by a target RNA of the disclosure primarily in a specific tissue comprising contacting the composition and a cell comprising the target RNA under conditions suitable for trans-splicing among the composition and the target RNA. In some embodiments, the cell is in vivo, in vitro, ex vivo or in situ. In some embodiments, the composition comprises a vector comprising composition comprising a guide RNA of the disclosure and a fusion protein of the disclosure. In some embodiments, the vector is an AAV.

[1323] The disclosure provides a method of treating a disease or disorder comprising administering to a subject a therapeutically effective amount of a composition of the disclosure.

[1324] The disclosure provides a method of treating a disease or disorder comprising administering to a subject a therapeutically effective amount of a composition of the disclosure, wherein the composition comprises a vector comprising composition comprising a guide RNA of the disclosure and a fusion protein of the disclosure and wherein the composition modifies a level of expression of an RNA molecule of the disclosure or a protein encoded by the RNA molecule.

[1325] The disclosure provides a method of treating a disease or disorder comprising administering to a subject a therapeutically effective amount of a composition of the disclosure, wherein the composition comprises a vector comprising composition comprising a guide RNA of the disclosure and a fusion protein of the disclosure and wherein the composition modifies an activity of a protein encoded by an RNA molecule.

[1326] In some embodiments of the compositions and methods of the disclosure, a disease or disorder of the disclosure includes, but is not limited to, a genetic disease or disorder. In some embodiments, the genetic disease or disorder is a single-gene disease or disorder. In some embodiments, the single-gene disease or disorder is an autosomal dominant disease or disorder, an autosomal recessive disease or disorder, an X-chromosome linked (X-linked) disease or disorder, an X-linked dominant disease or disorder, an X-linked recessive disease or disorder, a Y-linked disease or disorder or a mitochondrial disease or disorder. In some embodiments, the singe-gene disease or disorder is, but not limited to, common variable immune deficiency, Adenosine deaminase deficiency, X-linked severe combined immunodeficiency, Beta-thassalemia, alpha-thassalemia, myelodysplastic syndrome, Amyotrophic lateral sclerosis, Frontotemporal dementia with parkinsonism, Usher's syndrome, Krabbe disease, Niemann Pick disease, prion disease, Dravet syndrome, early-onset Parkinson's disease, spinocerebellar ataxias, genetic epilepsy disorders, Ataxia-telangiectasia, GM1 gangliosidosis, Gaucher disease, GM2 gangliosidosis, Angelman syndrome, glucose transporter deficiency type 1, Danon disease, Fabry disease, Autosomal dominant polycystic kidney disease, Pompe disease, Familial hypercholesterolemia, Open Angle Glaucoma, Hurler syndrome or Mucopolysaccharidosis 1, Hunter syndrome or Mucopolysaccharidosis 2, Batten disease, Duchenne muscular dystrophy, Limb-girdle muscular dystrophy type 1B, Limb-girdle muscular dystrophy type 2B, Limb-girdle muscular dystrophy type 2D, Limb-girdle muscular dystrophy type 2E, Limb-girdle muscular dystrophy type 2C, Limb-girdle muscular dystrophy type 2F, Facioscapulohumeral muscular dystrophy, Hemophilia B, Hemophilia A, Retinitis pigmentosa, cystic fibrosis, autosomal dominant hearing impairment, and non-syndromic hearing loss. In some embodiments, the genetic disease or disorder is a multiple-gene disease or disorder. In some embodiments, the genetic disease or disorder is a multiple-gene disease or disorder. In some embodiments, the single-gene disease or disorder is an autosomal dominant disease or disorder including, but not limited to, Huntington's disease, neurofibromatosis type 1, neurofibromatosis type 2, Marfan syndrome, hereditary nonpolyposis colorectal cancer, hereditary multiple exostoses, Von Willebrand disease, and acute intermittent porphyria. In some embodiments, the single-gene disease or disorder is an autosomal recessive disease or disorder including, but not limited to, Albinism, Medium-chain acyl-CoA dehydrogenase deficiency, cystic fibrosis, sickle-cell disease, Tay-Sachs disease, Niemann-Pick disease, spinal muscular atrophy, and Roberts syndrome. In some embodiments, the single-gene disease or disorder is X-linked disease or disorder including, but not limited to, muscular dystrophy, Duchenne muscular dystrophy, Hemophilia, Adrenoleukodystrophy (ALD), Rett syndrome, and Hemophilia A. In some embodiments, the single-gene disease or disorder is a mitochondrial disorder including, but not limited to, Leber's hereditary optic neuropathy.

[1327] In some embodiments of the compositions and methods of the disclosure, a disease or disorder of the disclosure includes, but is not limited to, an immune disease or disorder. In some embodiments, the immune disease or disorder is an immunodeficiency disease or disorder including, but not limited to, B-cell deficiency, T-cell deficiency, neutropenia, asplenia, complement deficiency, acquired immunodeficiency syndrome (AIDS) and immunodeficiency due to medical intervention (immunosuppression as an intended or adverse effect of a medical therapy). In some embodiments, the immune disease or disorder is an autoimmune disease or disorder including, but not limited to, Achalasia, Addison's disease, Adult Still's disease, Agammaglobulinemia, Alopecia areata, Amyloidosis, Anti-GBM/Anti-TBM nephritis, Antiphospholipid syndrome, Autoimmune angioedema, Autoimmune dysautonomia, Autoimmune encephalomyelitis, Autoimmune hepatitis, Autoimmune inner ear disease (AIED), Autoimmune myocarditis, Autoimmune oophoritis, Autoimmune orchitis, Autoimmune pancreatitis, Autoimmune retinopathy, Autoimmune urticaria, Axonal & neuronal neuropathy (AMAN), Baló disease, Behcet's disease, Benign mucosal pemphigoid, Bullous pemphigoid, Castleman disease (CD), Celiac disease, Chagas disease, Chronic inflammatory demyelinating polyneuropathy (CIDP), Chronic recurrent multifocal osteomyelitis (CRMO), Churg-Strauss Syndrome (CSS) or Eosinophilic Granulomatosis (EGPA), Cicatricial pemphigoid, Cogan's syndrome, Cold agglutinin disease, Congenital heart block, Coxsackie myocarditis, CREST syndrome, Crohn's disease, Dermatitis herpetiformis, Dermatomyositis, Devic's disease (neuromyelitis optica), Discoid lupus, Dressler's syndrome, Endometriosis, Eosinophilic esophagitis (EoE), Eosinophilic fasciitis, Erythema nodosum, Essential mixed cryoglobulinemia, Evans syndrome, Fibromyalgia, Fibrosing alveolitis, Giant cell arteritis (temporal arteritis), Giant cell myocarditis, Glomerulonephritis, Goodpasture's syndrome, Granulomatosis with Polyangiitis, Graves' disease, Guillain-Barre syndrome, Hashimoto's thyroiditis, Hemolytic anemia, Henoch-Schonlein purpura (HSP), Herpes gestationis or pemphigoid gestationis (PG), Hidradenitis Suppurativa (HS) (Acne Inversa), Hypogammalglobulinemia, IgA Nephropathy, IgG4-related sclerosing disease, Immune thrombocytopenic purpura (ITP), Inclusion body myositis (IBM), Interstitial cystitis (IC), Juvenile arthritis, Juvenile diabetes (Type 1 diabetes), Juvenile myositis (JM), Kawasaki disease, Lambert-Eaton syndrome, Leukocytoclastic vasculitis, Lichen planus, Lichen sclerosus, Ligneous conjunctivitis, Linear IgA disease (LAD), Lupus, Lyme disease chronic, Meniere's disease, Microscopic polyangiitis (MPA), Mixed connective tissue disease (MCTD), Mooren's ulcer, Mucha-Habermann disease, Multifocal Motor Neuropathy (MMN) or MMNCB, Multiple sclerosis, Myasthenia gravis, Myositis, Narcolepsy, Neonatal Lupus, Neuromyelitis optica, Neutropenia, Ocular cicatricial pemphigoid, Optic neuritis, Palindromic rheumatism (PR), PANDAS, Paraneoplastic cerebellar degeneration (PCD), Paroxysmal nocturnal hemoglobinuria (PNH), Parry Romberg syndrome, Pars planitis (peripheral uveitis), Parsonnage-Turner syndrome, Pemphigus, Peripheral neuropathy, Perivenous encephalomyelitis, Pernicious anemia (PA), POEMS syndrome, Polyarteritis nodosa, Polyglandular syndromes type I, II, III, Polymyalgia rheumatica, Polymyositis, Postmyocardial infarction syndrome, Postpericardiotomy syndrome, Primary biliary cirrhosis, Primary sclerosing cholangitis, Progesterone dermatitis, Psoriasis, Psoriatic arthritis, Pure red cell aplasia (PRCA), Pyoderma gangrenosum, Raynaud's phenomenon, Reactive Arthritis, Reflex sympathetic dystrophy, Relapsing polychondritis, Restless legs syndrome (RLS), Retroperitoneal fibrosis, Rheumatic fever, Rheumatoid arthritis, Sarcoidosis, Schmidt syndrome, Scleritis, Scleroderma, Sjögren's syndrome, Sperm & testicular autoimmunity, Stiff person syndrome (SPS), Subacute bacterial endocarditis (SBE), Susac's syndrome, Sympathetic ophthalmia (SO), Takayasu's arteritis, Temporal arteritis/Giant cell arteritis, Thrombocytopenic purpura (TTP), Tolosa-Hunt syndrome (THS), Transverse myelitis, Type 1 diabetes, Ulcerative colitis (UC), Undifferentiated connective tissue disease (UCTD), Uveitis, Vasculitis, Vitiligo, Vogt-Koyanagi-Harada Disease, or Wegener's granulomatosis.

[1328] In some embodiments of the compositions and methods of the disclosure, a disease or disorder of the disclosure includes, but is not limited to, an inflammatory disease or disorder.

[1329] In some embodiments of the compositions and methods of the disclosure, a disease or disorder of the disclosure includes, but is not limited to, a metabolic disease or disorder.

[1330] In some embodiments of the compositions and methods of the disclosure, a disease or disorder of the disclosure includes, but is not limited to, a degenerative or a progressive disease or disorder. In some embodiments, the degenerative or a progressive disease or disorder includes, but is not limited to, amyotrophic lateral sclerosis (ALS), Huntington's disease, Alzheimer's disease, and aging.

[1331] In some embodiments of the compositions and methods of the disclosure, a disease or disorder of the disclosure includes, but is not limited to, an infectious disease or disorder.

[1332] In some embodiments of the compositions and methods of the disclosure, a disease or disorder of the disclosure includes, but is not limited to, a pediatric or a developmental disease or disorder.

[1333] In some embodiments of the compositions and methods of the disclosure, a disease or disorder of the disclosure includes, but is not limited to, a cardiovascular disease or disorder.

[1334] In some embodiments of the compositions and methods of the disclosure, a disease or disorder of the disclosure includes, but is not limited to, a proliferative disease or disorder. In some embodiments, the proliferative disease or disorder is a cancer. In some embodiments, the cancer includes, but is not limited to, Acute Lymphoblastic Leukemia (ALL), Acute Myeloid Leukemia (AML), Adrenocortical Carcinoma, AIDS-Related Cancers, Kaposi Sarcoma (Soft Tissue Sarcoma), AIDS-Related Lymphoma (Lymphoma), Primary CNS Lymphoma (Lymphoma), Anal Cancer, Appendix Cancer, Gastrointestinal Carcinoid Tumors, Astrocytomas, Atypical Teratoid/Rhabdoid Tumor, Central Nervous System (Brain Cancer), Basal Cell Carcinoma, Bile Duct Cancer, Bladder Cancer, Bone Cancer, Ewing Sarcoma, Osteosarcoma, Malignant Fibrous Histiocytoma, Brain Tumors, Breast Cancer, Burkitt Lymphoma, Carcinoid Tumor, Carcinoma, Cardiac (Heart) Tumors, Embryonal Tumors, Germ Cell Tumor, Primary CNS Lymphoma, Cervical Cancer, Cholangiocarcinoma, Chordoma, Chronic Lymphocytic Leukemia (CLL), Chronic Myelogenous Leukemia (CML), Chronic Myeloproliferative Neoplasms, Colorectal Cancer, Craniopharyngioma, Cutaneous T-Cell Lymphoma, Ductal Carcinoma In Situ, Embryonal Tumors, Endometrial Cancer (Uterine Cancer), Ependymoma, Esophageal Cancer, Esthesioneuroblastoma (Head and Neck Cancer), Ewing Sarcoma (Bone Cancer), Extracranial Germ Cell Tumor, Extragonadal Germ Cell Tumor, Eye Cancer, Childhood Intraocular Melanoma, Intraocular Melanoma, Retinoblastoma, Fallopian Tube Cancer, Fibrous Histiocytoma of Bone, Malignant, and Osteosarcoma, Gallbladder Cancer, Gastric (Stomach) Cancer, Gastrointestinal Carcinoid Tumor, Gastrointestinal Stromal Tumors (GIST) (Soft Tissue Sarcoma), Childhood Gastrointestinal Stromal Tumors, Germ Cell Tumors, Childhood Extracranial Germ Cell Tumors, Extragonadal Germ Cell Tumors, Ovarian Germ Cell Tumors, Testicular Cancer, Gestational Trophoblastic Disease, Hairy Cell Leukemia, Head and Neck Cancer, Heart Tumors, Hepatocellular (Liver) Cancer, Histiocytosis, Hodgkin Lymphoma, Hypopharyngeal Cancer (Head and Neck Cancer), Intraocular Melanoma, Islet Cell Tumors, Pancreatic Neuroendocrine Tumors, Kaposi Sarcoma (Soft Tissue Sarcoma), Kidney (Renal Cell) Cancer, Langerhans Cell Histiocytosis, Laryngeal Cancer (Head and Neck Cancer), Leukemia, Lip and Oral Cavity Cancer (Head and Neck Cancer), Liver Cancer, Lung Cancer (Non-Small Cell and Small Cell), Childhood Lung Cancer, Lymphoma, Male Breast Cancer, Malignant Fibrous Histiocytoma of Bone and Osteosarcoma, Melanoma, Merkel Cell Carcinoma (Skin Cancer), Mesothelioma, Metastatic Squamous Neck Cancer with Occult Primary (Head and Neck Cancer), Midline Tract Carcinoma With NUT Gene Changes, Mouth Cancer (Head and Neck Cancer), Multiple Endocrine Neoplasia Syndromes, Multiple Myeloma/Plasma Cell Neoplasms, Mycosis Fungoides (Lymphoma), Myelodysplastic Syndromes, Myelodysplastic/Myeloproliferative Neoplasms, Nasal Cavity and Paranasal Sinus Cancer (Head and Neck Cancer), Nasopharyngeal Cancer (Head and Neck Cancer), Neuroblastoma, Non-Hodgkin Lymphoma, Non-Small Cell Lung Cancer, Oral Cancer, Lip and Oral Cavity Cancer and Oropharyngeal Cancer, Osteosarcoma and Malignant Fibrous Histiocytoma of Bone, Ovarian Cancer, Pancreatic Cancer, Pancreatic Neuroendocrine Tumors (Islet Cell Tumors), Papillomatosis, Paraganglioma, Parathyroid Cancer, Penile Cancer, Pharyngeal Cancer (Head and Neck Cancer), Pheochromocytoma, Plasma Cell Neoplasm/Multiple Myeloma, Pleuropulmonary Blastoma, Pregnancy and Breast Cancer, Primary Central Nervous System (CNS) Lymphoma, Primary Peritoneal Cancer, Prostate Cancer, Rectal Cancer, Recurrent Cancer, Renal Cell (Kidney) Cancer, Retinoblastoma, Rhabdomyosarcoma, Childhood (Soft Tissue Sarcoma), Salivary Gland Cancer (Head and Neck Cancer), Sarcoma, Childhood Rhabdomyosarcoma (Soft Tissue Sarcoma), Childhood Vascular Tumors (Soft Tissue Sarcoma), Ewing Sarcoma (Bone Cancer), Kaposi Sarcoma (Soft Tissue Sarcoma), Osteosarcoma (Bone Cancer), Uterine Sarcoma, S√©zary Syndrome, Lymphoma, Skin Cancer, Small Cell Lung Cancer, Small Intestine Cancer, Soft Tissue Sarcoma, Squamous Cell Carcinoma of the Skin, Squamous Neck Cancer, Stomach (Gastric) Cancer, T-Cell Lymphoma, Testicular Cancer, Throat Cancer (Head and Neck Cancer), Nasopharyngeal Cancer, Oropharyngeal Cancer, Hypopharyngeal Cancer, Thymoma and Thymic Carcinoma, Thyroid Cancer, Transitional Cell Cancer of the Renal Pelvis and Ureter, Renal Cell Cancer, Urethral Cancer, Uterine Sarcoma, Vaginal Cancer, Vascular Tumors (Soft Tissue Sarcoma), Vulvar Cancer, Wilms Tumor and Other Childhood Kidney Tumors.

[1335] In some embodiments of the compositions and methods of the disclosure, a disease or disorder of the disclosure includes, but is not limited to, a proliferative disease or disorder. In some embodiments, the proliferative disease or disorder is a cancer. In some embodiments, the cancer involves the present of a gene fusion that produces a chimeric RNA with sequences derived from two genes due to a deletion or translocation of DNA. Gene fusions pairs include but are not limited to: MAN2A1 and FER, DNAJB1 and PRKACA, BCR-ABL1, TMPRSS2 and ERG, EWSR1 and FLI1, PML and RARA, EML4 and ALK, KIAA1549 and BRAF, CCDC6 and RET, SS18 and SSX1, RUNX1 and RUNX1T1, PAX3 and FOXO1, NCOA4 and RET, ETV6 and RUNX1, FUS and DDIT3, SS18 and SSX2, NPM1 and ALK, KMT2A and AFF1, TCF3 and PBX1, STIL and TALI, COL1A1 and PDGFB, CRTC1 and MAML2, NAB2 and STATE, EWSR1 and ATF1, ETV6 and NTRK3, EWSR1 and ERG, EWSR1 and WT1, DNAJB1 and PRKACA, PAX7 and FOXO1, FUS and CREB3L2, CBFA2T3 and GLIS2, PAX8 and PPARG, KMT2A and MLLT1, EWSR1 and NR4A3, KMT2A and MLLT3, ASPSCR1 and TFE3, HMGA2 and LPP, JAZF1 and SUZ12, KIF5B and RET, FUS and ERG, SLC45A3 and ERG, NUP214 and ABL1, SET and NUP214, CD74 and ROS1, ETV6 and ABL1, TPM3 and NTRK1, PRKAR1A and RET, EWSR1 and CREB1, KMT2A and AFDN, EWSR1 and DDIT3, CLTC and ALK, ETV6 and PDGFRB, TPM3 and ALK, KMT2A and MLLT10, TMPRSS2 and ETV1, BRD4 and NUTM1, NUP98 and KDM5A, RANBP2 and ALK, CTNNB1 and PLAG1, KMT2A and ELL, TAF15 and NR4A3, FGFR3 and TACC3, PCM1 and JAK2, YWHAE and NUTM2B, STRN and ALK, CRTC3 and MAML2, CDH11 and USP6, CDKN2D and WDFY2, CIC and DUX4, SLC34A2 and ROS1, ATIC and ALK, CD74 and NRG1, MYB and NFIB, PRCC and TFE3, KIF5B and ALK, TMPRSS2 and ETV4, KMT2A and SEPT9, EWSR1 and POU5F1, FGFR1 and PLAG1, MN1 and ETV6, TBL1XR1 and TP63, KMT2A and EPS15, SLC45A3 and ELK4, DHH and RHEBL1, HEY1 and NCOA2, EZR and ROS1, GOPC and ROS1, HMGA2 and WIF1, KMT2A and CREBBP, SS18 and SSX4B, FAM131B and BRAF, EWSR1 and FEV, EWSR1 and PBX1, TPM4 and ALK, SND1 and BRAF, ACTB and GLI1, KMT2A and KNL1, KMT2A and SEPT6, SDC4 and ROS1, TFG and ALK, HNRNPA2B1 and ETV1, PTPRK and RSPO3, JAZF1 and PHF1, HMGA2 and RAD51B, KMT2A and MLLT11, TPR and NTRK1, AKAP9 and BRAF, FUS and CREB3L1, ETV6 and JAK2, HMGA2 and NFIB, KMT2A and AFF3, CHCHD7 and PLAG1, VTI1A and TCF7L2, LIFR and PLAG1, EWSR1 and ETV1, SRGAP3 and RAF1, KMT2A and AFF4, MEAF6 and PHF1, PAX3 and NCOA1, HAS2 and PLAG1, EWSR1 and NFATC2, HIP1 and ALK, GOLGA5 and RET, BCR and JAK2, EWSR1 and ETV4, DCTN1 and ALK, MBTD1 and CXorf67, NDRG1 and ERG, CARS and ALK, SFPQ and TFE3, KMT2A and ARHGAP26, KMT2A and EP300, KMT2A and TET1, PAX5 and JAK2, PPFIBP1 and ALK, YWHAE and NUTM2A, LRIG3 and ROS1, TFG and NTRK1, TPM3 and ROS1, SLC45A3 and ETV1, ERC1 and RET, SEC16A and NOTCH1, KTN1 and RET, SEC31A and JAK2, TCEA1 and PLAG1, QKI and NTRK2, RNF130 and BRAF, EIF3E and RSPO2, EWSR1 and ZNF444, LMNA and NTRK1, PPFIBP1 and ROS1, PWWP2A and ROS1, EWSR1 and YY1, FUS and ATF1, PAX3 and NCOA2, ZC3H7B and BOOR, BRD3 and NUTM1, CANT1 and ETV4, CIC and FOXO4, COL1A1 and USP6, EWSR1 and ZNF384, KMT2A and ABI1, KMT2A and ACTN4, KMT2A and CEP170B, KMT2A and FOXO3, KMT2A and GAS7, KMT2A and MLLT6, KMT2A and SEPT2, KMT2A and SEPT5, MSN and ALK, VCL and ALK, EZR and ERBB4, RELCH and RET, SLC3A2 and NRG1, TRIM24 and BRAF, KLC1 and ALK, ARID1A and MAST2, GPBP1L1 and MAST2, NFIX and MAST1, NOTCH1 and GABBR2, TADA2A and MAST1, ZNF700 and MAST1, TRIM24 and RET, TRIM33 and RET, SSBP2 and JAK2, KMT2A and EEFSEC, CLCN6 and BRAF, GNAI1 and BRAF, MKRN1 and BRAF, NACC2 and NTRK2, FGFR1 and TACC1, TRIM27 and RET, HMGA2 and FHIT, HOOK3 and RET, PCM1 and RET, CEP89 and BRAF, CLIP1 and ROS1, ERC1 and ROS1, HLA and A and ROS1, LSM14A and BRAF, MYO5A and ROS1, SHTN1 and ROS1, TP53 and NTRK1, TPM3 and ROS1, ZCCHC8 and ROS1, FGFR3 and BAIAP2L1, KLK2 and ETV1, ACSL3 and ETV1, NUP107 and LGR5, HMGA2 and CCNB1IP1, HMGA2 and COX6C, GATM and BRAF, HACL1 and RAF1, HERPUD1 and BRAF, ZSCAN30 and BRAF, SLC45A3 and BRAF, HMGA2 and LHFPL6, COL1A2 and PLAG1, ESRP1 and RAF1, IRF2BP2 and CDX1, TFG and NR4A3, CLTC and TFE3, EWSR1 and MYB, NONO and TFE3, FCHSD1 and BRAF, HMGA2 and EBF1, ACBD6 and RRP15, AGPAT5 and MCPH1, AGTRAP and BRAF, ARFIP1 and FHDC1, ATG4C and FBXO38, BBS9 and PKD1 L1, CENPK and KMT2A, CNBP and USP6, DDX5 and ETV4, EIF3K and CYP39A1, EPC1 and PHF1, ERO1A and FERMT2, ETV6 and ITPR2, EWSR1 and NFATC1, EWSR1 and PATZ1, EWSR1 and SMARCA5, EWSR1 and SP3, FBXL18 and RNF216, FGFR1 and ZNF703, FN1 and ALK, FUS and FEV, GMDS and PDE8B, HMGA2 and ALDH2, IL6R and ATP8B2, INTS4 and GAB2, JPT1 and USH1G, KLK2 and ETV4, KMT2A and ABI2, KMT2A and ARHGEF12, KMT2A and BTBD18, KMT2A and CASP8AP2, KMT2A and CBL, KMT2A and CIP2A, KMT2A and CT45A2, KMT2A and DAB2IP, KMT2A and FOXO4, KMT2A and FRYL, KMT2A and GMPS, KMT2A and GPHN, KMT2A and LASP1, KMT2A and LPP, KMT2A and MAPRE1, KMT2A and MYO1F, KMT2A and NCKIPSD, KMT2A and NRIP3, KMT2A and PDS5A, KMT2A and PICALM, KMT2A and PRRC1, KMT2A and SARNP, KMT2A and SH3GL1, KMT2A and SORBS2, KMT2A and TOP3A, KMT2A and ZFYVE19, MBOAT2 and PRKCE, MIA2 and GEMIN2, NF1 and ASIC2, NFIA and EHF, NTN1 and ACLY, OMD and USP6, PLA2R1 and RBMS1, PLXND1 and TMCC1, RAF1 and DAZL, RBM14 and PACS1, RGS22 and SYCP1, SEC31A and ALK, SEPT8 and AFF4, SLC22A1 and CUTA, SLC26A6 and PRKAR2A, SLC45A3 and ETV5, SQSTM1 and ALK, SS18L1 and SSX1, SSH2 and SUZ12, SUSD1 and PTBP3, TCF12 and NR4A3, TECTA and TBCEL, THRAP3 and USP6, TMPRSS2 and ETV5, TPR and ALK, UBE2L3 and KRAS, WDCP and ALK, SS18 and USP6

[1336] In some embodiments of the methods of the disclosure, a subject of the disclosure has been diagnosed with the disease or disorder. In some embodiments, the subject of the disclosure presents at least one sign or symptom of the disease or disorder. In some embodiments, the subject has a biomarker predictive of a risk of developing the disease or disorder. In some embodiments, the biomarker is a genetic mutation.

[1337] In some embodiments of the methods of the disclosure, a subject of the disclosure is female. In some embodiments of the methods of the disclosure, a subject of the disclosure is male. In some embodiments, a subject of the disclosure has two XX or XY chromosomes. In some embodiments, a subject of the disclosure has two XX or XY chromosomes and a third chromosome, either an X or a Y.

[1338] In some embodiments of the methods of the disclosure, a subject of the disclosure is a neonate, an infant, a child, an adult, a senior adult, or an elderly adult. In some embodiments of the methods of the disclosure, a subject of the disclosure is at least 1, 2, 3, 4, 5, 6, 7, 8, 9, 10, 11, 12, 13, 14, 15, 16, 17, 18, 19, 20, 21, 22, 23, 24, 25, 26, 27, 28, 29, 30 or 31 days old. In some embodiments of the methods of the disclosure, a subject of the disclosure is at least 1, 2, 3, 4, 5, 6, 7, 8, 9, 10, 11 or 12 months old. In some embodiments of the methods of the disclosure, a subject of the disclosure is at least 1, 2, 3, 4, 5, 6, 7, 8, 9, 10, 15, 20, 25, 30, 35, 40, 45, 50, 55, 60, 65, 70, 75, 80, 85, 90, 95, 100 or any number of years or partial years in between of age.

[1339] In some embodiments of the methods of the disclosure, a subject of the disclosure is a mammal. In some embodiments, a subject of the disclosure is a non-human mammal.

[1340] In some embodiments of the methods of the disclosure, a subject of the disclosure is a human.

[1341] In some embodiments of the methods of the disclosure, a therapeutically effective amount comprises a single dose of a composition of the disclosure. In some embodiments, a therapeutically effective amount comprises a therapeutically effective amount comprises at least one dose of a composition of the disclosure. In some embodiments, a therapeutically effective amount comprises a therapeutically effective amount comprises one or more dose(s) of a composition of the disclosure.

[1342] In some embodiments of the methods of the disclosure, a therapeutically effective amount eliminates a sign or symptom of the disease or disorder. In some embodiments, a therapeutically effective amount reduces a severity of a sign or symptom of the disease or disorder.

[1343] In some embodiments of the methods of the disclosure, a therapeutically effective amount eliminates the disease or disorder.

[1344] In some embodiments of the methods of the disclosure, a therapeutically effective amount prevents an onset of a disease or disorder. In some embodiments, a therapeutically effective amount delays the onset of a disease or disorder. In some embodiments, a therapeutically effective amount reduces the severity of a sign or symptom of the disease or disorder. In some embodiments, a therapeutically effective amount improves a prognosis for the subject.

[1345] In some embodiments of the methods of the disclosure, a composition of the disclosure is administered to the subject systemically. In some embodiments, the composition of the disclosure is administered to the subject by an intravenous route. In some embodiments, the composition of the disclosure is administered to the subject by an injection or an infusion.

[1346] In some embodiments of the methods of the disclosure, a composition of the disclosure is administered to the subject locally. In some embodiments, the composition of the disclosure is administered to the subject by an intraosseous, intraocular, intracerebrospinal or intraspinal route. In some embodiments, the composition of the disclosure is administered directly to the cerebral spinal fluid of the central nervous system. In some embodiments, the composition of the disclosure is administered directly to a tissue or fluid of the eye and does not have bioavailability outside of ocular structures. In some embodiments, the composition of the disclosure is administered to the subject by an injection or an infusion.

[1347] In some embodiments, the compositions comprising the trans-splicing RNAs disclosed herein are formulated as pharmaceutical compositions. Briefly, pharmaceutical compositions for use as disclosed herein may comprise a fusion protein(s) or a polynucleotide encoding the fusion protein(s), optionally comprised in an AAV, which is optionally also immune orthogonal, in combination with one or more pharmaceutically or physiologically acceptable carriers, diluents or excipients. Such compositions may comprise buffers such as neutral buffered saline, phosphate buffered saline and the like; carbohydrates such as glucose, mannose, sucrose or dextrans, mannitol; proteins; polypeptides or amino acids such as glycine; antioxidants; chelating agents such as EDTA or glutathione; adjuvants (e.g., aluminum hydroxide); and preservatives. Compositions of the disclosure may be formulated for oral, intravenous, topical, enteral, intraocular, and/or parenteral administration. In certain embodiments, the compositions of the present disclosure are formulated for intravenous administration.

### EXAMPLE EMBODIMENTS

[1348] Embodiment 1: A trans-splicing nucleic acid, comprising: (a) one or more replacement domains that encode a therapeutic sequence operably linked to; (b) one or more intronic domains that promote RNA splicing of the replacement domain primarily in a specific tissue or cell type; and (c) one or more antisense domains that promote binding to a target RNA molecule.

[1349] Embodiment 2: The composition of embodiment 1, wherein the intronic domains promote trans-splicing primarily in brain tissue and are derived or isolated from genes selected from the group consisting of: UBB, GFAP, STMN1, RPL13A, UCHL1, TUBB2B, ALDOA, LRRC75A-AS1, DYNLRB1, TPI1, PKM, NDRG2, MT3, RTN3, SKP1, RTN1, NRGN, DBNDD2, BSCL2, ALDOC, S100B, GNG3, FXYD6, PRDX1, HSP90AA1, SRP14, ATF4, NDUFB8, CAPZB, ATF5, ADD1, ERGIC3, GUK1, DCTN1, GSN, MORF4L1, GNAI2, SPP1, CRIP2, RNASE1, EIF4G2, PAQR6, DCTN3, CALB2, COMMD6, MEST, STXBP1, CLDND1, SH3GLB2, NREP, ABCA2, SUN2, UBXN6, DBI, CDK2AP1, NFIX, SF1, HNRNPF, GPM6B, SQSTM1, MOBP, ANAPC11, POLD2, SAMD4B, IST1, TPD52, SHD, STK25, ABR, PQBP1, PHB, SEPT9, S100A13, APBB1, RANBP1, ARHGEF2, DLGAP4, GNAO1, SEZ6L2, FDFT1, CBX1, EIF4G1, FAM213A, MAPK8IP1, PSME1, CCAR2, TKT, SYN1, OGDH, OCIAD1, SLC3A2, SLC1A5, PTTG1, DNM1, MAP6, KDM1A, PTN, FN1, CSNK1E, TMEM9, MATR3, AHCYL1, ATP6V0A1, CDIP1, CYFIP2, SLIRP, SCG5, TPX2, DMTN, SSBP1, PFKL, KIAA0930, CAMTA1, PRC1, CHTF8, TMPRSS3, BIN1, CCT8, AMZ2, TM7SF2, SEC11A, CLPTM1, AMPD2, DHX9, GAB2, CLTC, PSME3, RPP21, DYNC1I2, CDC20, NOSIP, ATP13A2, AIF1L, SURF4, PTPRN2, STK24, SDR39U1, HMOX2, UBAP2L, NRCAM, CCDC3, GPT2, TN P02, NRXN2, PPP1R7, CAMK2A, UBE2L6, DBNL, ADAR, RNF220, MCM2, DTNA, PDIA6, PSMG2, URM1, SNX17, SV2A, SPG21, REEP2, HSD17B4, GSTO1, TRAPPC3, ZNF385A, SHISA5, FAM107B, MID1IP1, SERPINE2, CDK5RAP3, COMMD4, ANAPC15, CABP1, PTPRA, NPTN, RERE, VPS29, SPTBN2, MT1G, DTX3, GOLGA7, TPD52L2, EPB41L3, SPIN1, FARP1, NUP62, CNOT1, TMEM108, DUT, MAPRE2, PSD, NEBL, UBE2L3, KIF5C, TCF19, WDR54, CPSF7, GIT1, L1CAM, ITPR3, RHPN2, HMGA1, KCNAB2, HID1, SHF, CD99L2, C19ORF25, PAF1, B4GALT2, PTGES2, CAPG, SEMA4D, TTYH2, EXOC7, CNDP1, TACC2, BACE1, GABBR1, LMNB1, SLAIN1, GLG1, APBA2, CADM3, PC, PHLDB1, HHATL, SOGA1, CNTNAP2, RFC2, MAPK8IP3, CD200, REC8, TACC3, SYT13, SRP68, KLC4, CORO1C, ATPAF1, NARF, AP3B2, NUP93, FAM102A, SCN1B, NDUFS2, CBFA2T2, PSMA5, EPB41, and BCAR1.

[1350] Embodiment 3: The composition of embodiment 2, wherein the intronic domains promote trans-splicing primarily in brain tissue and are selected from the group consisting of SEQ ID NO 1-SEQ ID NO 492.

[1351] Embodiment 4: The composition of embodiments 2 or 3, wherein the replacement domain is derived or isolated from a human gene a selected from the group consisting of: SOD1, TARDBP, FUS, MATR3, SOD1, C9ORF72 (Amyotrophic lateral sclerosis); MAPT, PGRN (Frontotemporal dementia with parkinsonism); CDH23, MYO7A, USH2A (Usher's syndrome); GALC (Krabbe disease); SMPD1, NPC1, NPC2 (Niemann Pick disease); PRNP (prion disease); SCN1A (Dravet syndrome); PINK1, ATPGAP2 (early-onset Parkinson's disease); ATXN1, ATXN2, ATXN3, PLEKHG4, SPTBN2, CACNA1A, ATXN7, TTBK2, PPP2R2B, KCNC3, PRKCG, ITRP1, TBP, KCND1, FGF14 (spinocerebellar ataxias); SCN1A, SCN2A, CACNA1A, GRIN2B, GRIN2A, MECP2, FOXG1, SLC6A1, PRRT2, PTEN, KCNQ2, KCNQ3, STARD7, CLRN1 (genetic epilepsy disorders); ATM (Ataxia-telangiectasia); GLB1 (GM1 gangliosidosis); GBA (Gaucher disease); GM2A (GM2 gangliosidosis); UBE3A (Angelman syndrome); SLC2A1 (glucose transporter deficiency type 1); GLA (Fabry disease); MYOC, OPTN, TBK1, WDR36, CYPIB1 (Open Angle Glaucoma); IDUA (Hurler syndrome or Mucopolysaccharidosis 1); IDS (Hunter syndrome or Mucopolysaccharidosis 2); and CLN3 (Batten disease).

[1352] Embodiment 5: The composition of any one of embodiments 2-4, wherein the antisense domain is complementary to sequences derived or isolated from a human gene selected from the group consisting of: OD1, TARDBP, FUS, MATR3, SOD1, C9ORF72 (Amyotrophic lateral sclerosis); MAPT, PGRN (Frontotemporal dementia with parkinsonism); CDH23, MYO7A, USH2A (Usher's syndrome); GALC (Krabbe disease); SMPD1, NPC1, NPC2 (Niemann Pick disease); PRNP (prion disease); SCN1A (Dravet syndrome); PINK1, ATPGAP2 (early-onset Parkinson's disease); ATXN1, ATXN2, ATXN3, PLEKHG4, SPTBN2, CACNA1A, ATXN7, TTBK2, PPP2R2B, KCNC3, PRKCG, ITRP1, TBP, KCND1, FGF14 (spinocerebellar ataxics); SCN1A, SCN2A, CACNA1A, GRIN2B, GRIN2A, MECP2, FOXG1, SLC6A1, PRRT2, PTEN, KCNQ2, KCNQ3, STARD7, CLRN1 (genetic epilepsy disorders); ATM (Ataxia-telangiectasia); GLB1 (GM1 gangliosidosis); GBA (Gaucher disease); GM2A (GM2 gangliosidosis); UBE3A (Angelman syndrome); SLC2A1 (glucose transporter deficiency type 1); GLA (Fabry disease); MYOC, OPTN, TBK1, WDR36, CYPIB1 (Open Angle Glaucoma); IDUA (Hurler syndrome or Mucopolysaccharidosis 1); IDS (Hunter syndrome or Mucopolysaccharidosis 2); and CLN3 (Batten disease).

[1353] Embodiment 6: The composition of embodiment 1, wherein the intronic domains promote trans-splicing primarily in liver tissue and are derived or isolated from genes selected from the group consisting of: ORM1, ORM2, PLG, ALDOB, CYP2C8, CPS1, ADH4, PON1, CFHR3, C6, DBI, ITIH3, ITIH4, C4BPB, PTGR1, C5, LBP, PRDX1, HPD, UBB, HPR, ADH6, RPL15, CXCL2, DPYS, HAL, SLC39A14, AQP9, SERPINA10, ADH1A, HABP2, SERPINF2, ECI2, APOM, KLKB1, ACSM5, SLCO1B3, ASGR2, IL1RAP, PSMA1, GRB14, LRRC75A-AS1, BCHE, EPHX1, DMGDH, MST1, ACSM3, SEPT2, TFR2, NDUFC1, NR1H4, AFMID, HNMT, TTC39C, RDH16, GPAM, SLC13A5, SERF2, PICALM, PCSK6, TOM1L1, ANPEP, EBNA1BP2, RCL1, DEPDC7, BTG1, KRT8, ABCA6, GJB1, KMO, HSD17B13, LEAP2, PECR, LEPR, CTNND1, ENSA, MASP2, KYNU, ABCB4, DNASE1L3, ACSL5, UBE2V1, SPTBN1, RBPMS, RAB13, IL1R1, SERPINA5, FGGY, TMEM220, ACSS2, VNN1, CTAGE5, MS4A6A, MFSD2A, SKAP1, VDAC2, SLC22A7, PPP2R5C, SORBS2, CDV3, CSAD, TRPM8, TOMM5, SLCO2B1, MICU1, NCOR1, GSAP, CBWD5, ENPP1, SPATS2L, FKBP5, NR3C1, IGF2, IGF1, PLSCR4, MYLK, SLC27A5, ALDH5A1, TXLNGY, PSMB5, MOCOS, PET100, SGK1, AZI2, TJP2, FMO4, STEAP1, DMD, RNF14, RBM34, PABPC1L, ZCCHC9, ANO6, AGMAT, MASP1, IL17RB, MRPS27, MLIP, MON2, ETF1, SULT1B1, GBP7, PRKACA, PI4K2B, SP100, TMED6, NFU1, RMDN2, IP6K2, CCNB1IP1, PCBP1-AS1, SLC39A1, and PHF11

[1354] Embodiment 7: The composition of embodiment 6, wherein the intronic domains promote trans-splicing primarily in liver tissue and are selected from the group consisting of SEQ ID NO 493-SEQ ID NO 798.

[1355] Embodiment 8: The composition of any one of embodiments 6-7, wherein the replacement domain is derived or isolated from a human gene a selected from the group consisting of: GLB1 (GM1 gangliosidosis); GBA (Gaucher disease); GM2A (GM2 gangliosidosis); PCSK9, LDLR, APOB, APOE (Familial hypercholesterolemia); GAA (Pompe disease); MYOC, OPTN, TBK1, WDR36, CYPIB1 (Open Angle Glaucoma); IDS (Hunter syndrome or Mucopolysaccharidosis 2); IDUA (Hurler syndrome or Mucopolysaccharidosis 1); CLN3 (Batten disease); F9 (Hemophilia B); and F8 (Hemophilia A).

[1356] Embodiment 9: The composition of any one of embodiments 6-8, wherein the antisense domain is complementary to sequences derived or isolated from a human gene selected from the group consisting of: GLB1 (GM1 gangliosidosis); GBA (Gaucher disease); GM2A (GM2 gangliosidosis); PCSK9, LDLR, APOB, APOE (Familial hypercholesterolemia); GAA (Pompe disease); MYOC, OPTN, TBK1, WDR36, CYPIB1 (Open Angle Glaucoma); IDS (Hunter syndrome or Mucopolysaccharidosis 2); IDUA (Hurler syndrome or Mucopolysaccharidosis 1); CLN3 (Batten disease); F9 (Hemophilia B); and F8 (Hemophilia A).

[1357] Embodiment 10: The composition of embodiment 1, wherein the intronic domains promote trans-splicing primarily in heart tissue and are derived or isolated from genes selected from the group consisting of: TNNI3, TNNT2, MB, FHL2, CSRP3, FHL1, UBB, MYOM2, CD36, GSN, PDHA1, CRIP2, POPDC2, SORBS2, CPT1B, RYR2, ANXA11, ITGA7, SORBS1, NDUFC1, NEXN, MYH7B, ABLIM1, NEBL, CAST, NME2, CYB5R3, TRDN, TACC2, NDUFA5, MYL12B, FHOD3, CALCOCO2, NCAM1, GPD1L, SGCA, AQP1, AKAP1, ARL6IP4, LRRC39, TTN, TSC22D1, PPP1R12B, OBSL1, MYO15B, PKIG, HMOX2, CDK18, BTNL9, ITGB1BP2, SEPT2, CAV2, DTNA, C15orf41, ATP1A1, BCO2, MYL4, ADCY5, CLIC5, SLC8A1, RRAD, AKAP13, AK3, MYO1C, FGF12, LAMA5, ADAM15, WNK2, SUN1, KLHL7, RNF207, HIF3A, HSPG2, LPCAT4, ADH1B, ENY2, RGS3, FRMD3, CCNB1IP1, PHC2, STAB1, HAND2-AS1, PTPN3, PARVB, PKD1, SPEG, SYNE2, ZNF638, SEPT4, DAG1, SLC12A7, FBXO18, FAM107A, RBM17, MYPN, GRIP2, SCN5A, WFS1, RABGAP1L, SYNE1, HLA-DRB5, SNRPN, MEG3, RAPGEF3, SEC13, C1QTNF1, UCKL1, FRY, IP6K2, CUX1, ANK3, MYH14, ADCY4, C3orf18, MYLK3, PXN, TSPAN18, PDE1C, C6orf48, BCS1L, ATG4D, HRAS, TENM2, PLXNB1, N4BP2L2, TNXB, LTBP1, MAPK8IP3, COL1A1, GOAT, ACOT11, MTUS2, VPS45, and KCNIP2.

[1358] Embodiment 11: The composition of embodiment 10, wherein the intronic domains promote trans-splicing primarily in heart tissue and are selected from the group consisting of SEQ ID NO 799-SEQ ID NO 1104.

[1359] Embodiment 12: The composition of embodiments 10 or 11, wherein the replacement domain is derived or isolated from a human gene a selected from the group consisting of: LAMP2 (Danon disease); GLA (Fabry disease); SLC2A1 (glucose transporter deficiency type 1); UBE3A (Angelman syndrome); MYOC, OPTN, TBK1, WDR36, CYPIB1 (Open Angle Glaucoma); IDUA (Hurler syndrome or Mucopolysaccharidosis 1); IDS (Hunter syndrome or Mucopolysaccharidosis 2); CLN3 (Batten disease); LMNA (Limb-girdle muscular dystrophy type 1B); DMD (Duchenne muscular dystrophy); DYSF (Limb-girdle muscular dystrophy type 2B); SGCB (Limb-girdle muscular dystrophy type 2E); SGCG (Limb-girdle muscular dystrophy type 2C); SGCA (Limb-girdle muscular dystrophy type 2D); SGCD (Limb-girdle muscular dystrophy type 2F); DUX4, D4Z4 (Facioscapulohumeral muscular dystrophy); F9 (Hemophilia B); F8 (Hemophilia A).

[1360] Embodiment 13: The composition of any one of embodiments 10-12, wherein the antisense domain is complementary to sequences derived or isolated from a human gene selected from the group consisting of: LAMP2 (Danon disease); GLA (Fabry disease); SLC2A1 (glucose transporter deficiency type 1); UBE3A (Angelman syndrome); MYOC, OPTN, TBK1, WDR36, CYPIB1 (Open Angle Glaucoma); IDUA (Hurler syndrome or Mucopolysaccharidosis 1); IDS (Hunter syndrome or Mucopolysaccharidosis 2); CLN3 (Batten disease); LMNA (Limb-girdle muscular dystrophy type 1B); DMD (Duchenne muscular dystrophy); DYSF (Limb-girdle muscular dystrophy type 2B); SGCB (Limb-girdle muscular dystrophy type 2E); SGCG (Limb-girdle muscular dystrophy type 2C); SGCA (Limb-girdle muscular dystrophy type 2D); SGCD (Limb-girdle muscular dystrophy type 2F); DUX4, D4Z4 (Facioscapulohumeral muscular dystrophy); F9 (Hemophilia B); F8 (Hemophilia A).

[1361] Embodiment 14: The composition of embodiment 1, wherein the intronic domains promote trans-splicing primarily in retinal tissue and are derived or isolated from genes selected from the group consisting of: ADGRV1, AMPH, ATP1B2, BSG, CASK, CC2D2A, CEP290, CLTC, DMD, DOC2B, EFR3A, ERP44, FARP2, FN3KRP, GRAMD1B, GSS, HCN1, IFT140, IMPDH1, INTS13, KCTD5, KIF1B, KIF1B, KMT2D, MADD, MAN2A2, MARCH1, MSI2, NAP1L4, PPP3CC, PROM1, PTPRF, PTPRF, RIMS2, SLC17A7, SLC4A7, STXBP5, TTC8, UNC13B, UNC13B, WDR47, and YKT6.

[1362] Embodiment 15: The composition of embodiment 14, wherein the replacement domain is derived or isolated from a human gene a selected from the group consisting of: USHA2A, RPGR, RP2, RHO, PRPF31, USH1F, PRPF3, PRPF6 (Retinitis pigmentosa)

[1363] Embodiment 16: The composition of embodiments 14 or 15, wherein the antisense domain is complementary to sequences derived or isolated from a human gene selected from the group consisting of: USHA2A, RPGR, RP2, RHO, PRPF31, USH1F, PRPF3, PRPF6 (Retinitis pigmentosa)

[1364] Embodiment 17: The composition of embodiment 1, wherein the intronic domains promote trans-splicing primarily in muscle tissue and are derived or isolated from genes selected from the group consisting of: ALDOA, TNNT3, MYBPC1, ATP2A1, NEB, STAC3, CMYA5, MYH7, TNNI1, CA3, ASB5, PLIN2, TRDN, OBSCN, RYR1, RAP1A, SPARCL1, CSNK1A1, NPEPPS, AKR1C3, IDI2, MBNL1, FNDC5, TMOD4, ATP6V1F, DAP3, KPNB1, NOMO2, BEST3, HP1BP3, SEPT2, TIMM23, MYPN, DHRS7C, PALLD, POLR2J3, KANSL3, THOC7, MEF2C, NOMO1, YWHAZ, ZBTB16, SPAG9, CCZ1, MYLK2, ASAH1, GTF2I, CCPG1, SURF4, SMARCA2, CLTCL1, SLC6A6, CHRNB1, MAFG, COMMD6, SLC7A8, CDK11B, and DNASE1L1

[1365] Embodiment 18: The composition of embodiment 17, wherein the intronic domains promote trans-splicing primarily in muscle tissue and are selected from the group consisting of SEQ ID NO 1105-SEQ ID NO 1220.

[1366] Embodiment 19: The composition of embodiments 17 or 18, wherein the replacement domain is derived or isolated from a human gene a selected from the group consisting of: LAMP2 (Danon disease); GLA (Fabry disease); SLC2A1 (glucose transporter deficiency type 1); UBE3A (Angelman syndrome); MYOC, OPTN, TBK1, WDR36, CYPIB1 (Open Angle Glaucoma); IDUA (Hurler syndrome or Mucopolysaccharidosis 1); IDS (Hunter syndrome or Mucopolysaccharidosis 2); CLN3 (Batten disease); LMNA (Limb-girdle muscular dystrophy type 1B); DMD (Duchenne muscular dystrophy); DYSF (Limb-girdle muscular dystrophy type 2B); SGCB (Limb-girdle muscular dystrophy type 2E); SGCG (Limb-girdle muscular dystrophy type 2C); SGCA (Limb-girdle muscular dystrophy type 2D); SGCD (Limb-girdle muscular dystrophy type 2F); DUX4, D4Z4 (Facioscapulohumeral muscular dystrophy); F9 (Hemophilia B); and F8 (Hemophilia A)

[1367] Embodiment 20: The composition of any one of embodiments 17-19, wherein the antisense domain is complementary to sequences derived or isolated from a human gene selected from the group consisting of: LAMP2 (Danon disease); GLA (Fabry disease); SLC2A1 (glucose transporter deficiency type 1); UBE3A (Angelman syndrome); MYOC, OPTN, TBK1, WDR36, CYPIB1 (Open Angle Glaucoma); IDUA (Hurler syndrome or Mucopolysaccharidosis 1); IDS (Hunter syndrome or Mucopolysaccharidosis 2); CLN3 (Batten disease); LMNA (Limb-girdle muscular dystrophy type 1B); DMD (Duchenne muscular dystrophy); DYSF (Limb-girdle muscular dystrophy type 2B); SGCB (Limb-girdle muscular dystrophy type 2E); SGCG (Limb-girdle muscular dystrophy type 2C); SGCA (Limb-girdle muscular dystrophy type 2D); SGCD (Limb-girdle muscular dystrophy type 2F); DUX4, D4Z4 (Facioscapulohumeral muscular dystrophy); F9 (Hemophilia B); and F8 (Hemophilia A)

[1368] Embodiment 21: The composition of embodiment 1, wherein the the intronic domains carry binding sites that are preferentially-targeted by RNA-binding proteins with disease-causing mutations.

[1369] Embodiment 22: The composition of any one of embodiments 1-21, wherein the intronic domains carry binding sites for RNA-binding proteins selected from the group consisting of: DDX39, DDX3X, DDX3Y, DDX41, DDX5, DHX16, DHX8, DHX9, INTS6, DDX48, HNRNPA0, HNRNPA1, HNRNPA2B1, HNRPA3, HNRPAB, HNRPC, HNRPDL, HNRPF, HNRPH1, HNRPH2, HNRPLL, HNRPM, HNRPUL1, PTBP1, PTBP2, RBMXL2, SYNCRIP, CLK3, CLK4, SRPK1, SRPK2, SRPK3, ARS2, BUB3, C7ORF30, CIRBP, CRNKL1, CSDA, DNAJC8, EEF1A1, EIF3S10, FMR1, GRSF1, GTL3, IGF2BP3, IK, ILF2, ILF3, MATR3, MBNL1, MBNL2, MBNL3, MOV10, MSI1, MSI2, MYEF2, NHP2L1, PABPC1, PCBP1, PCBP2, PCBP4, PPIE, PPIL2, PPIL2, PPM1G, PPWD1, PRPF6, PSEN1, RALY, RBM15, RBM9, RBMS1, RBMX, RDBP, ROD1, SSB, THOC3, THOC4, TNPO1, TOP1MT, ZFP207, EFTUD2, LSM1, LSM2, LSM3, LSM4, LSM7, LSM8, NA, SART1, SF3A1, SF3A2, SF3A3, SF3B1, SF3B2, SNRPA, SNRPA1, SNRPB, SNRPC, SNRPD1, SNRPD2, SNRPG, SNRPN, TXNL4, U2AF1L1, U2AF1L2, USP39, WDR57, PRPF31, PRPF4, PRPF40A, RBM17, NA, A2BP1, ACIN1, ASCC3L1, BCAS2, BRUNOL4, BUD13, BUD31, CD2BP2, CDC40, CDC5L, CRKRS, CUGBP2, ELAVL1, ELAVL1, ELAVL1, ELAVL2, ELAVL3, ELAVL4, FUSIP1, HSPA1B, HSPA5, HSPA8, NCBP2, NONO, NOVA1, NUDT21, PLRG1, PRPF19, PSIP1, RBM8A, RBMS1, SMU1, SNW1, TCERG1, TIA1, TIAL1, TNRC4, WBP11, WTAP, XAB2, YBX1, SFRS1, SFRS10, SFRS16, SFRS3, SFRS4, and SFRS6

[1370] Embodiment 23: The composition of any one of embodiments 1-22, wherein the trans-splicing RNA comprises an untranslated region that increases that alters the processing of the trans-splicing nucleic acid.

[1371] Embodiment 24: the composition of any one of embodiments 1-23, wherein the sequence comprising the trans-splicing nucleic acid comprises a sequence that is bound by an RNA-binding protein that increases the trans-splicing efficiency.

[1372] Embodiment 25: the composition of any of one embodiments 1-24, wherein the trans-splicing nucleic acid is RNA, DNA, a DNA/RNA hybrid, nucleic acid analog, a chemically-modified nucleic acid, or a chimera composed of two or more nucleic acids or nucleic acid analogs.

[1373] Embodiment 26: the composition of any of one embodiments 1-25, wherein the wherein the trans-splicing nucleic acid molecule further comprises a heterologous promoter.

[1374] Embodiment 27: the composition of any of one embodiments 1-26, wherein the promoter is isolated or derived from a promoter capable of driving expression of a transfer RNA (tRNA).

### EXAMPLES

### Example 1: Methods for Identification of Intronic Domains that Promote Trans-Splicing in Muscle

[1375] In order to identify Intronic Domains that will promote trans-splicing in muscle but not other tissues, the following experimental strategy is conducted: 1) analysis of unbiased RNA sequencing data from muscle, brain, liver, and kidney, and 2) identification of exons that are included primarily in muscle (“muscle-specific exons”), then 3) extraction of intronic sequences that are adjacent to the muscle-specific exons (“muscle-specific introns”). These muscle-specific introns promote inclusion of adjacent exons during RNA splicing, but RNA trans-splicing is less-efficient and most intronic sequences do not function efficiently in the context of trans-splicing. In order to identify muscle-specific introns that function in the context of RNA trans-splicing (“muscle-specific trans-splicing introns” or MSTI's), candidate MSTI's are selected from the group of muscle-specific introns and compared in a trans-splicing tissue culture experiment. The readout for the trans-splicing tissue culture experiment relies on a reporter that carries a GFP coding sequence interrupted by an exon carrying a stop codon and flanked by two introns (FIG. 4A). When transfected into a mammalian cell line, this reporter does not produce active GFP protein (FIG. 4B). The candidate MSTI's are placed in a trans-splicing RNA vector carrying antisense sequences that target the reporter and an exon that contains no stop codon (FIG. 4A). Successful trans-splicing among the trans-splicing vector and the reporter results in production of active GFP protein (FIG. 4B). In this manner, GFP expression serves as a proxy for the efficiency associated with RNA trans-splicing afforded by the MSTI. GFP expression among experiments conducted in muscle cell lines compared to brain, liver, and kidney cell lines or primary cells is assessed. MSTI's will be identified based on the following criteria: both 1) high GFP expression in muscle cell lines or primary cells, and 2) low GFP expression in brain, liver, and kidney cell lines or primary cells. These MSTI's serve as Intronic Domains that promote tissue-specific trans-splicing in muscle but not other tissues.

### Example 2: Identification of Intronic Domains that Promote Trans-Splicing in Brain, Liver, or Kidney Tissue

[1376] In order to identify Intronic Domains that will promote trans-splicing in other tissues such as brain, liver, or kidney, a similar experiment as above is conducted. Here, introns that promote tissue-specific exon inclusion in the respective tissue will be compared in a similar assay. The candidate tissue-specific intronic sequences are similarly placed in a trans-splicing RNA vector and successful tissue-specific intronic sequences are identified based upon the following criteria: both 1) high GFP expression in cells derived from the chosen cell lines or primary cells, and 2) low GFP expression in cell lines or primary cells derived from other tissues. Intronic sequences that fit these criteria will serve as Intronic Domains that promote tissue-specific trans-splicing in a chosen tissue but not other tissues.

### Example 3: Identification of a Therapeutic Trans-Splicing System to Treat Limb-Girdle Muscular Dystrophy (LGMD) that is Active Exclusively in Muscle Tissue

[1377] LGMD1B is a devastating muscle disease that causes progressive muscle wasting and death. The disease is caused by mutations in the gene LMNA that cause dysfunctional behavior of the gene (specifically, inappropriate inclusion of exon 9 which carries a stop codon). In order to identify trans-splicing systems that address this dysfunctional inclusion of exon 9 in LMNA in order to treat LGMD1B, we compare tens of systems that replace exon 9 with a short exon that carries no stop codons. We constructs 50+ trans-splicing RNA constructs that carry introns that are effectively spliced in muscle but not other tissues (SEQ ID NO 1105-SEQ ID NO 1220) and carry a replacement a reporter that carries a replacement for exon 9 from LMNA gene (FIG. 5A). Next, we Then, we co-transfect this reporter and individual trans-splicing RNA constructs in human cells lines derived from muscle or another non-muscle cell-type such as HEK cells. Next, we conduct RT-PCR measurements in both cell types primers flanking exon 9 to identify degree of replacement of exon 9 by the trans-splicing RNA replacement sequence. Finally, high-quality trans-splicing RNA systems are identified by the following metric: 1) high levels of replacement sequence inclusion in the LMNA reporter in muscle cells (>50%), with 2) low levels of replacement sequence inclusion in the LMNA reporter in HEK cells (<20%).

### Cells and Tissues

[1378] In some embodiments of the compositions and methods of the disclosure, a cell of the disclosure is a eukaryotic cell. In some embodiments, the cell is a mammalian cell. In some embodiments, the cell is a bovine, murine, feline, equine, porcine, canine, simian, or human cell. In some embodiments, the cell is a non-human mammalian cell such as a non-human primate cell. In some embodiments, a cell of the disclosure is a somatic cell. In some embodiments, a cell of the disclosure is a germline cell. In some embodiments, a germline cell of the disclosure is not a human cell.

[1379] In some embodiments of the compositions and methods of the disclosure, a cell of the disclosure is a stem cell. In some embodiments, a cell of the disclosure is an embryonic stem cell. In some embodiments, an embryonic stem cell of the disclosure is not a human cell. In some embodiments, a cell of the disclosure is a multipotent stem cell or a pluripotent stem cell. In some embodiments, a cell of the disclosure is an adult stem cell. In some embodiments, a cell of the disclosure is an induced pluripotent stem cell (iPSC). In some embodiments, a cell of the disclosure is a hematopoietic stem cell (HSC).

[1380] In some embodiments of the compositions and methods of the disclosure, an immune cell of the disclosure is a lymphocyte. In some embodiments, an immune cell of the disclosure is a T lymphocyte (also referred to herein as a T-cell). Exemplary T-cells of the disclosure include, but are not limited to, naïve T cells, effector T cells, helper T cells, memory T cells, regulatory T cells (Tregs) and Gamma delta T cells. In some embodiments, an immune cell of the disclosure is a B lymphocyte. In some embodiments, an immune cell of the disclosure is a natural killer cell. In some embodiments, an immune cell of the disclosure is an antigen-presenting cell.

[1381] In some embodiments of the compositions and methods of the disclosure, a muscle cell of the disclosure is a myoblast or a myocyte. In some embodiments, a muscle cell of the disclosure is a cardiac muscle cell, skeletal muscle cell or smooth muscle cell. In some embodiments, a muscle cell of the disclosure is a striated cell.

[1382] In some embodiments of the compositions and methods of the disclosure, a somatic cell of the disclosure is an epithelial cell. In some embodiments, an epithelial cell of the disclosure forms a squamous cell epithelium, a cuboidal cell epithelium, a columnar cell epithelium, a stratified cell epithelium, a pseudostratified columnar cell epithelium or a transitional cell epithelium. In some embodiments, an epithelial cell of the disclosure forms a gland including, but not limited to, a pineal gland, a thymus gland, a pituitary gland, a thyroid gland, an adrenal gland, an apocrine gland, a holocrine gland, a merocrine gland, a serous gland, a mucous gland and a sebaceous gland. In some embodiments, an epithelial cell of the disclosure contacts an outer surface of an organ including, but not limited to, a lung, a spleen, a stomach, a pancreas, a bladder, an intestine, a kidney, a gallbladder, a liver, a larynx or a pharynx. In some embodiments, an epithelial cell of the disclosure contacts an outer surface of a blood vessel or a vein.

[1383] In some embodiments of the compositions and methods of the disclosure, a brain cell of the disclosure is a neuronal cell. In some embodiments, a neuron cell of the disclosure is a neuron of the central nervous system. In some embodiments, a neuron cell of the disclosure is a neuron of the brain or the spinal cord. In some embodiments, a neuron cell of the disclosure is a neuron of a cranial nerve or an optic nerve. In some embodiments, a neuron cell of the disclosure is a neuron of the peripheral nervous system. In some embodiments, a neuron cell of the disclosure is a neuroglial or a glial cell. In some embodiments, a glial of the disclosure is a glial cell of the central nervous system including, but not limited to, oligodendrocytes, astrocytes, ependymal cells, and microglia. In some embodiments, a glial of the disclosure is a glial cell of the peripheral nervous system including, but not limited to, Schwann cells and satellite cells.

[1384] In some embodiments of the compositions and methods of the disclosure, a liver cell of the disclosure is a hepatocytes. In some embodiments, a liver cell of the disclosure is a hepatic stellate cell. In some embodiments, a liver cell of the disclosure is Kupffer cell. In some embodiments, a liver cell of the disclosure is a sinusoidal endothelial cells.

[1385] In some embodiments of the compositions and methods of the disclosure, a retinal cell of the disclosure is a photoreceptor. In some embodiments, a photoreceptor cell of the disclosure is a rod. In some embodiments, a retinal cell of the disclosure is cone. In some embodiments, a retinal cell of the disclosure is a bipolar cell. In some embodiments, a retinal cell of the disclosure is a ganglion cell. In some embodiments, a retinal cell of the disclosure is a horizontal cell. In some embodiments, a retinal cell of the disclosure is an amacrine cell.

[1386] In some embodiments of the compositions and methods of the disclosure, a heart cell of the disclosure is a cardiomyocyte. In some embodiments, a heart cell of the disclosure is a cardiac pacemaker cell.

[1387] In some embodiments of the compositions and methods of the disclosure, a somatic cell of the disclosure is a primary cell.

[1388] In some embodiments of the compositions and methods of the disclosure, a somatic cell of the disclosure is a cultured cell.

[1389] In some embodiments of the compositions and methods of the disclosure, a somatic cell of the disclosure is in vivo, in vitro, ex vivo or in situ.

[1390] In some embodiments of the compositions and methods of the disclosure, a somatic cell of the disclosure is autologous or allogeneic.

### INCORPORATION BY REFERENCE

[1391] Every document cited herein, including any cross referenced or related patent or application is hereby incorporated herein by reference in its entirety unless expressly excluded or otherwise limited. The citation of any document is not an admission that it is prior art with respect to any invention disclosed or embodimented herein or that it alone, or in any combination with any other reference or references, teaches, suggests or discloses any such invention. Further, to the extent that any meaning or definition of a term in this document conflicts with any meaning or definition of the same term in a document incorporated by reference, the meaning or definition assigned to that term in this document shall govern.

### OTHER EMBODIMENTS

[1392] While particular embodiments of the disclosure have been illustrated and described, various other changes and modifications can be made without departing from the spirit and scope of the disclosure. The scope of the appended claims includes all such changes and modifications that are within the scope of this disclosure.

The application's sequence listing, which the Patent Office published only in electronic form, follows.

SEQUENCE LISTING (1220 sequences)

SEQ ID NO: 1 - DNA, 499 bp, Homo sapiens
  source 1..499: mol_type = other DNA
cgaagggactcgtccgcggcgccggctcagacccactgtagccgactcattaccgcccaaagtcctggagccctcgaccgggcatggagaacaccgtggaggaaccctaagagagggaatcctgcgaagagaagtcaggtggtggccttgccggaaacgggaccaaagtcctctagctgggattacgggagccggcgagggacctattatgtcagggttcagacaacccagctctgcatgcaagcctttccaattgccagtcttggggcgggctcacatcttctctacaaggcgaactcactacacgccttgggtgcctatcgtccctagcaaccacccgcgatttaaggcggaagtacctccctggtcctcctcctcctccggaccaaccaagccctcgtgaggaagcgcgttggcccaatcacctaggcgggaactactaccagccaataggaagcaggcacaggagggcgggctaaagaggtcgcggtcgcacgcg

SEQ ID NO: 2 - DNA, 499 bp, Homo sapiens
  source 1..499: mol_type = other DNA
tcaagcgaccgtcccacgtcagcctcccgagtagcaaggactacaggcacaaaaaagtttttaaattttttggtacagaaggggtttccctatgatccccaggctggtctccaattcctggcctcaagcggtcctcccggctcggactcccaaagagctgggatcacagacgtgaaccacgcgcccggccacattccccaattaatggtttttggagagtggccggtttggaacgggctagcggagtcgttcgttagttaggtccctgcagtgtagatggaggacggaaacggcgctgtgacataagcgggaggaggcgggctgaggcagcgctgtgacgtagcagatgaaagccgggcccgcgctgcactgaggtacttctctgagtgacaagcgggacaagtacgccgtgggcggggccggcgggtcgtgatgttagttcgcgctgtgtggaggcgggccggcgtggcgctgtgacgcagcgggagaagacgggctg

SEQ ID NO: 3 - DNA, 499 bp, Homo sapiens
  source 1..499: mol_type = other DNA
ggcgcggccaggcggggtccgcggactccggcctgggaaggatgcgcgcggactagggcgcggggagccaaggcccagaacatcggtaccgcgctcccttcagccgaggggctgcagagaggccagggggcagggggcagggggcagggggcagggggcaaagggcaagggcagaaaggaacccacgtagccaaacggcacccagcggccccgaccccaagtgtcccgacgaggggggacgcctgcgactaacgcggggacagcccccgccgcgcgccaccgccgcaccccaggcaccgggcccccacgcagggacggcgtggaccaccctacccccgaaccccgaggctctggccaacactgaggccccctgtgcctcgaggccgcgtccaacctcccccgcggcgccggcccacatggttccgcccgccgcgggccgcgttacctaggagaccgacccgccgcggccgcgccggaggccacggagcccacgcttttc

SEQ ID NO: 4 - DNA, 499 bp, Homo sapiens
  source 1..499: mol_type = other DNA
tgagtaccggggagaccccggcggggcgcgctttccaccaagctgctccgggacggcggcggcgggtatccgcgaggcccgcgctgcggcaggcgccgcggtcccgtctccatctcttcttccccggccctgcgtccctgcctccgccgctgtctcacctcctctccagcctcctcacctccttctccatcgtctcccttcccccatccctttctgtctttccttccctgtcctcccgcccgcccgacccttcagctcgcatccctgacccctgcccctgccgccgtccctcttcccggtgcacctcttccccatctctgcccgctccggtcctagcagcctcgccctcccctttcctccatcctcctctcatcccctctcccggcctctgcgcagccccaccggggcgctgctgttcccggtcctccccatctctcctcctgatcgcttctcaaggctcatccgtcgttctcgctgcctgtccctgtgtcgctccggt

SEQ ID NO: 5 - DNA, 499 bp, Homo sapiens
  source 1..499: mol_type = other DNA
cgccccaccctgtcccccctggttgggctcgtaccggccagggccccctggccaggaaaggtctgtagcatgtatgtttcatgtgtttaatgaattctgtaaccatcagccattccctgtaccccaaagggtcttaacctaggctctaggaatgaactacagagtaactccaagcccctaaaattataggaaaatgcatacgtaggtacatttccctggtccttggctgtcctgggttctcgacgcctctatggctcccggagggtaaggccccagctgcccatcgagtctgccggctggtgtgtccccacggggcttcgtaggtgctgtcccagagccttagtcttggagctggagccagacgcagaggtgccctcggtctccctgggccgctgccaggcggctgtggccccttcttgctccttctctgttgcgccgtcttccttccttccttccttccctctttccaactgaattctcgtttttcctctctccctag

SEQ ID NO: 6 - DNA, 499 bp, Homo sapiens
  source 1..499: mol_type = other DNA
taggtggctgggactggattcttcttctgtctctggtgctcgggaagggtctgtggagggcactgagggcgcggggctccgcatgcgacacggcttcgggctgagagccctggtgagcttgcctagggagacttcggctgttgcggcactgaggccagctcagtggctgggctggtgttgtcatgtgtcaggaaggggagaaggcctggtggcaggggtagctgtcacccactgatgggaaataaacctaggtgcttccagcttccaaggcgcctcagttttcttttgatgaggacaagaaagaaggccgagtatcctgccctgaaatgcctgttggctgaaagctgtacattcattttctctcatgggttagttacaaggcacatgtggaaaacaggctcccggaggttgccaggcacagctggattgattgggatagctgtggggaaaggaggaaggagctccgtaatcgatttgtgatgtctgctgtggcagggat

SEQ ID NO: 7 - DNA, 499 bp, Homo sapiens
  source 1..499: mol_type = other DNA
gtcagtatttgaaattttctccttgagtggctattataagaggatcccgtaagaattgattactgtgaaattagccaactacatagtgtatttcaaagataaggtaaactgttggacttgtgattacctggtttctggtatgaattactgaacttatgtttgtttttatgtgcatagataaagctatatgcttgatactctttcaattataaacttaatgggttataagaatttataacttgggcttcattaagtgaagaaggcgctcttatactttgtctttttgttttgttttctttttttttttccttcttttgagacagggtcttgctttgttgcccaggctggagtggtgcaattatagttcactgcagccttgacctcctgggctcaagcgatcctcccaccttggccttccaaagtattaggattacaggtgtgaactatcatgcccggcctaatttatctttgttaagcttcacctgttctgttgatgata

SEQ ID NO: 8 - DNA, 499 bp, Homo sapiens
  source 1..499: mol_type = other DNA
gcctcctgggttctagcaattctcctgcctcggcctccaaagtagctgagattacaggcgcccgccaccatgcccagctaatttttgtatttgtagtagaaacggggtttcaccgtgttggccaggctggtctcgaactcctgacctcaagtgatccgcccacctcggcctcccaaagtgctgggattacaagcgtgagccactgcacccggccttcctgcttctttatgttccgctatccgatcctcacagcttctttaaaccttcctaatattgagaaacatacccgatgtaagacactgttaaaaagaatccagcatctgggggaggtgttagggaattgaatgttgctaaagcaccaaagagagaggagtttgactattttgagcttgtctgtgacacctgttttgtttggaaaatgctaatgaaactagttggcagagctgcatttttgaagttgtttcatttagtcacagtgatagtcatctgtcttctttta

SEQ ID NO: 9 - DNA, 499 bp, Homo sapiens
  source 1..499: mol_type = other DNA
gtgaggcagccccattgccccttcccagaagcccctgctaccctggcctccccaacttccccaaccctcggcccccccataaaggctgactctggcgcctcccatcctagggagggaagatggctctgtgagcacagggaggtgccagggcagctcccagagctcgagagtaaccctcacctgcttccccagcctggagccgtccccacagtcccaggcagaggatggccggagccaggcggcagttggggcggtaccagagggtgcctggaaggatacggcccagctccacaagagcgaggaggcggtgagtgtcggacaggtgggttctgaaaaagtccttgcccctctctcggcctcggtttcatgatctgtgcaatgggagagtcagacttcatgttctcccaccaccttttagttctgttgtcccaaacatccaggatgctgtctgagcacgtttacactttcaggcctctccccacctctctgtctggtgaca

SEQ ID NO: 10 - DNA, 499 bp, Homo sapiens
  source 1..499: mol_type = other DNA
ctcgctgcgttcgcagaggctcagcggctactgtggcagtccatggagggtcatcggctatcacgtcgtggtctggatgatggctgggatccctttgctgctcttccgttggaagcccctgtggggggtgcggctgcggctccggccctgcaacctggcccacgccgaaacactcgttatcgaaataagagacaaagaggtgagagtcaggctgagcctggggctagagaagcgcagtgagggtcagggtcgggggtggaggatgcttgggtgccaacccggccactgactttccatgggacattaggcaggtcccgctcttctctggacctcagctttcccatctgagcattgggcagaagggacgggtcgggtggtttctggagggctctccatagccttgatttctgccttctccagcaggggccgcctggctgtaggacagggcctgggaggggaggggactcttctgagactgagtccatacctctgtgttcca

SEQ ID NO: 11 - DNA, 499 bp, Homo sapiens
  source 1..499: mol_type = other DNA
gtgagcagaacgcctagggagagtgctggctccgctcgtggtgtttgttttggtaaagaaggcagatgctatccagacttttgaggaacctggggtttcacataggcccccacagatagacctgccctcctgccacttgacccttctgcaggacaggcccagcacttaggttggaagggccagagaacttcttcctgacaggatcaagggatttttggagcatgtttgtatgtggactttgggcctcaaagtgttttgaggaccatggttccttgtttagtcaagggatgttgctgctgaacgagggtgagtagttgagatgggttaagctttcttttgatgccttcctgtatgctgattaaaaacatgggcaatgccacttttaaggccttcggatttgtccagtaactttggctgaaaactccttgtttggggaggtgggcctggccccaggccttgatggagaacgacttctccagggcagtggtgggtgaggact

SEQ ID NO: 12 - DNA, 499 bp, Homo sapiens
  source 1..499: mol_type = other DNA
agctggagtcccactcactacctctgtgttcaggctggtctctcccatagcccaggctagaccctccctcccgaaccgtgtccccagccaggcaccccctcggtgaccctggcgtgggcccccttcctcccccggtctagggctaggtctgctttcccccgtctctccggcccaggctaggccgtcgtttctccctgccatggcccaggctaggccgctgcctccctctgtccctccccctttgccttctccatggcctcaggctggaccccggtcagccccttctgcagcggcctaggtttgcttcccctcttctccgtggcctcagcctgaatctcctcttctctctgtgaacttaaatctggacctcctcttctccgcccatggcccccgtctggacctcactgccccctccccaccatgatccccttccctggacttttcgccactcctagcgtaacctgcgtcagccccgctcggtccccgccctgagcctctc

SEQ ID NO: 13 - DNA, 499 bp, Homo sapiens
  source 1..499: mol_type = other DNA
ctaggtggaaatggatggggcctggtggctgacaatctcacataatctcatacaactgagcctcgggttagaatggtgtaccggagatgcagtcctgtcatctggtgtcagtcaaatgtggcagcaatcttttggtttggtttttgtttgtttgattttgttgttgttgttgttgttgttgttactgttctgtgtttttcctttcctcttttgagttttgctttattcctcactgctttctgacacttccccctcactcccctgtcttttgttaactgcctttcttttggccatttctgtgccttgactttcccatttggtctctgtacaatctgttccttatttctctggtggttgcagcttctgagctaacagaatgcttctgtcatgctatgtgtttaaagccttgattttattgctgtcatacaaaactaaacttgatgtggctgttgggctgttatttacagtttatttctctctctgctgcactggttaaaag

SEQ ID NO: 14 - DNA, 499 bp, Homo sapiens
  source 1..499: mol_type = other DNA
tatttttttcataatttttcaaatcattttcctcactgtttacaataacccattaaaagcttgaaacctaaatcttttcctttcaaagatcctctccatcatacattcacactggtttgttgttgtagagttgcgcctatatgttgggctggtgccatttgagtttttgtcattgaaagcacgtgtaaaacattaggttttttgtgggtggtgtgggtggactaagggggaaagtgtaatgaatccagtgggctgctcagcaaacagagggaagaaacaggtcaaatttggtccctctaaccttgacagtgtccctttaaatatttctctaccacacaccctggaccccagttactgagcctgagtgctgtgtactttttcagtatgaacttccctttgtgattgtcatcctagttgcaaagattaaagcttgtctgaagcaagccatccagttgacactggaagagctttaatctgtaccatttgcacacttgtgttt

SEQ ID NO: 15 - DNA, 499 bp, Homo sapiens
  source 1..499: mol_type = other DNA
gtttgaagatgtcagttgccatgtcaatttttatattattattttttccatttcctggtaatgagatgctatgttatctttatttatttatttatttatttgttagagacggggtctcgcttcgtcgcccaggctgcagggtagtggcgcaactataagctcactgctgtctggaattcctgggttcaagtgaacctcccacctcagcctcagcagctgggactaaaggcacataataccacacccagctaatatttaaatgttttgtagagactgtgtctcaccatgttgcccaggctattctccaactcctggctgaagcaatcctctggcctcagcctcccatattcttttttaaacagcttctttagagcacaatttacataccataaagttgacctcttttaaaagtgtacattgcgccgggcgcggtggctcacacctgtaatcccagcactttgggaggccaaggagggtggatcacgaggtcaggagatcg

SEQ ID NO: 16 - DNA, 499 bp, Homo sapiens
  source 1..499: mol_type = other DNA
gaagccatttttccaaggtcacatagaaagctaatgatggagaatagactcaaacttgctgcactgcctgagttttggattttctttttttccttccattccttccctctgcccttccctcccactgtcctccaattcatatttgtcacatgcctactttgcaccagcccagtaccctgacctccttgccttagaaccttaggcttccagagcctaggtcatcaccacctcttcctatcaaacctcctccccacaccccgttcctgcctgacctttcctactcgttaaaaatccagatgcctaggttgcttcccataccaacaagatcagaatgtctgggggtgggggccaggtgtcagtattttttaaagatccctggatgattccatttgtagcaaagtttgagaaccactgttttagccctgatgaagggcccctccacctcctgtcccttggcctctgggttgcagatgacctggtgatttttctttttcttcca

SEQ ID NO: 17 - DNA, 499 bp, Homo sapiens
  source 1..499: mol_type = other DNA
aacgcctactgtgtaccagacctatgcttgacatttaacttacatcgctaattctcaggaaaacattgtaagatttatggttgacgaaattcagatccagagaagtgacttgttcagggtcacgccggacgaagtggtaggacaggcgatccaggtgagtctcctcagggtcacttccctagatcccctctgaccaacccctctacctagtaaccttaggagcagtaccacgtgtcaaattgcttcacacttttgtcatatgacgtcacaccagtcaatccaggaactccctgcccttccctcccctgacctctggggtctatcaaagcagcccccggctcagtgtccccgccggacgaggctacacctgcagcccccgccccttcccaactgcgactctcgcactcctctgcccgggcctccccctccccgccccgctgatcggcagttgcctgcgccaatcagagggcctagcgggcggggcggggcctcacgatgg

SEQ ID NO: 18 - DNA, 499 bp, Homo sapiens
  source 1..499: mol_type = other DNA
tgagcctggaccacctggggggcgaccctcggtccccgggagggacggggttagggacagaagaacctacccccaagggctcggaccgtcccgggagaggcgagaccagggtcgaagggtccagggctgaggggtccagcggtcccgaattccagaatccgaacttggggtccaaaggagtctgggcatcttaaagttcagggtgcagggaggggcgtgggagtctggagagggggtccgggagctcggatccggagctagacacgtccgggtccggccggtcctggctgtctggggcgggggtcctgcattcggtgtccgcgggagagtccctgcaggtcggcgcagcccccggccgccccctagccccgccttgcccggccccgcatgctcctgccgggcccgcagcagcgctggagcgggctggcggctagcagcgggagggggctccggggcctggagccccgcgccccgctccggcccttacgtaactgacttt

SEQ ID NO: 19 - DNA, 499 bp, Homo sapiens
  source 1..499: mol_type = other DNA
gggctttaacattggagtccggctgattgaagatttcttggctcggtcaaatgttgggaggtgccatgactttcgggaaactgcggatgtcattgccaaggtcattattctgggccacctgtccatgctgaagaattgctgctgagaggcactgcttaccactctttctatctcccttagagaggcctttaatctcccaaaagactggctaggcagctctttgggtcaaaaaaacattccaggtcgttagggaatagcatagattatttaatccctgtggattaaagccccactgaaatcaaagcctgagcttttccactgtgaaggtgtagcagagtagcatgggggtaaagaatacagactcggtcgggcgtggtggctcacatctgtaatcctagcactttgggaggcccaggcgggtggaacacaagatcaggagttcaagaccagcctggccaagatggtgaaaccccatctctactaaaaatacaaaagtttg

SEQ ID NO: 20 - DNA, 499 bp, Homo sapiens
  source 1..499: mol_type = other DNA
ccctgctgctttgaccttgcaggccaaatttcctggctcctccaaaggggatgatgttctttccctccagacacagttagagggaatcctgacagttgcatcaaggctggtccagactctcaccacgctttctcttttgtgctgcttggtcctgactgccttttgaatctcttttagagctctgagctcttcaccctgacctatggtgccctggtcacccagctatgtaaggactatgaaaatgatgaagatgtgaataaacagctggacaaaatgtgagtgagctccttcataggagagacagaaatggggcctcccagcacactgagtctacattgtcctttagagcttaaaacagggttctctctctttcttagccaacattttgggtacatttctcactaaactcatttactgggatgtttttgagattatccccattttccctttaccaccaacaaccttatgttcaaacataagacatttagactccatcata

SEQ ID NO: 21 - DNA, 499 bp, Homo sapiens
  source 1..499: mol_type = other DNA
gtggcactggacaacagtgtgtacctgtggagtgcaagctctggtgacatcctgcagcttttgcaaatggagcagcctggggaatatatatcctctgtggcctggatcaaagagggcaactacttggctgtgggcaccagcagtgctgaggtgcaggtgagacgtgtccagtgctgtcattctcaccagtcccaatgggcttgcacagctggaggatattaatgccaagtcccaatctctgatcctagtgggcttctctctctagctatgggatgtgcagcagcagaaacggcttcgaaatatgaccagtcactctgcccgagtgggctccctaagctggaacagctatatcctgtccaggtcagtggtttttgttggtctatggtagtctgatatttgcccaccctccccttgactgtacacccctgaactgaaccagctctggcttgcttgcatttggtgctgccacagaacctgattcccttctttcctcctccag

SEQ ID NO: 22 - DNA, 499 bp, Homo sapiens
  source 1..499: mol_type = other DNA
tgagtagggttgggctgaagcctctgcagaccctcacctataatctggggactgttaaggggagaagggatggtaggattggactgggttaatctgtgacccctagagctccttgtctggctctagtacctgctgaccccacctttattccatctaggccgtagcatggtgtccctggcagtccaatgtcctggcaacaggagggggcaccagtgatcgacacattcgcatctggaatgtgtgctctggggcctgtctgagtgccgtggatgcccattcccaggtaatcttttgcctgttcctgcctctcccacatgcattcttaccgggcaactacattcactccaatggcttcaccaactctatgccctggtgattcccaaacttctaactcagctctcactcatgagcttcatttccaacagtctgtggctatctccaatcctatgtcctataggcaccaccaccttgatctgtcccaaattaaccttgtcacttc

SEQ ID NO: 23 - DNA, 499 bp, Homo sapiens
  source 1..499: mol_type = other DNA
ggatgtatggctgtggaagtccaggagcagtggccttgtttgtgagtgtgggacttagtgtgttactgtcacccgggtgtgtctgtgactgtagttctctgtgtgtctgagtgtgggtgaccagctgggaccagggtgtccctgtgattctgtgtgcctgtgagactcaccctgctccctgaagcactgccagaagtggctgccgctctcttggaaccacagctggagccatcgcccaggcaagacccccttcctgccatgcccagtgctgtgcccatctccaggcccaagcatcccgttccgggaatcagaaccagctgtgctgggcaggacccagagtcttggtcccagtcccaaggggctggctttgaggtcttaagtgaggggtgtcccctgccttgccccgtattttgacgttttgctccagtgggaagggattctgtaaacatccagtctgtatttgggccccccggatgctgagggcaacttcccagcctgg

SEQ ID NO: 24 - DNA, 499 bp, Homo sapiens
  source 1..499: mol_type = other DNA
taggtgcacagtattccgtctcttccctcttccccaagccatgagttctgggttaaggatgctgccatgtgaggtgtctgttctcaggggcacaggggcacatgggggtctataggtaaacatgtctccatgcttaggtacaaaccagtgtggttagagttcacgtgtctgtgttcctgggaatgcgtgagtgtgtgtgtagagttgtgcaataagggtgagtgcctgagtgtgtgtgtcagtgaggtggaggaaggtaaatgtatgtggcttagtagtggggtgtgcttgaggatgtgagtactgagttgccgggaactgtgcctgggtgtctgtttggaggtaaattcttgagtctgtgagtgtgaaagggtatgagcaggtcagtgtgaggtgtggcccacgagtgtgagcagctgagtgggaggtaggtgggcagccttgcctgtcctgccctgacctgctggatctgtttccctcccaccctgctcaggccagc

SEQ ID NO: 25 - DNA, 499 bp, Homo sapiens
  source 1..499: mol_type = other DNA
gagaagcattccaggaacaaagcagcaggtaagatttttctgggaaaagacagagattttgagggacccaggatttgggggtcatttaagcagcagtggatgtcagtcttcaagctttgcccatttactcttggtcccttttggttcaggaaaggaagaacaacaagcacgaaaccattcactgagacctttgcgggtgggggaggagggatgtaaacaaaagccaacgctctctttagttcacaatggctcgcgaccccaagacttccaagctctttggtgagggccagcaggtctgttctccaggagtgccctgggtctggacttcatttcccagagtcccttagtgccctaatgtattcagtgctcagagtgcctgtatgtgtgtgagtgtgagagaatgtgtgcgtgcgtgtgtgtgtgcgcgcgtgtgtgtgtctccgagtccctgggagagtggaggctcattcactgattagatccagcgctgagaggcagc

SEQ ID NO: 26 - DNA, 499 bp, Homo sapiens
  source 1..499: mol_type = other DNA
tatggagatcagaaaggggtgtggacgtgtgtgcgtacccaagaggggtgggtgcgagggcggccggcttgttcaggaacctggctaactttccgggtccgtttcctagggattcgggcggttccctctggacgggggcagggactgggactcggactggcgcgtcttggatcatcgcgacggagcctctcggcatcggcgccctgcgcgctccgtgcgctgcctcgctcaaactttccgtcttgagttttccttaatgtgttttatttggggagggggggaggtgcaagggggagggaccagacgcgggaattggacaagttgggagggtgagggcactgcaagggaagggagcaggacttcttttctccgtctcttaataagccccattcccactttgttcgggtcgatatcgagaatgccttctcgccgggctctctggtgcaccccccggtgatttccgggctcccctatgtaccccgcgttgatttccggcgag

SEQ ID NO: 27 - DNA, 499 bp, Homo sapiens
  source 1..499: mol_type = other DNA
gcaagcgtggactcgagtcgagtcttcccccggcaactcgagcacgtggcgcggcgtctgggcgggctggtggtgggggtctccgagactagcctcctgccggacggggtgggttcgggaagcttctggaatggacctgtatccagactcgtggctgtagaagacagcctctatgtatttggctgttccgggtcctgagccttgactagctgcggagcttcgggtaccctttccccgtctttattttcctgtacgtggaatggagttagcgatgagcccaaatgtccccgctgaagcactctctctgctggtgctttctccagtgctggggagggacagggggcacctgaagtggggtttagggatgtggccctctacgctgggcagatcccctgaaggggcccggtggcggcctgaatcccagcagcctttaccccgaattggttgggttttgtacttgggggccacttgggaaagaaggattggacgagaaggccat

SEQ ID NO: 28 - DNA, 499 bp, Homo sapiens
  source 1..499: mol_type = other DNA
aagcgttcgggttcgggagcggccacaagggcgcctcactccaacctcagccatccgcaacagggtggggtattagtatttttccgcacccgccccaacgagggaaagcgccgagtcattccggcggggcgcgccgggcggggctcgggccacatccccctcctctctctcctcctccggcacccccgtccgttccgactctcgcgagatccctactggctataaaggcagcgccccggagagctcttgcgcgtcttgttcttgcctggtgtcggtggttagtttctgcgacttgtgttgggactggtgagtgtgggcagtgcggcccctgcggagtgaggcgcggcgcgcccttcttgcctgttgcctcttcctcctcctgtccggggcccgcccgcgctcgggtgggggtgctgtgatgcgtgaggcagccgggggaggcccggagtccgagactgcttgagcgctgcgcacacccctctcgtgggccccccacgta

SEQ ID NO: 29 - DNA, 499 bp, Homo sapiens
  source 1..499: mol_type = other DNA
gtagttacagtagaaaattgggattctacattgtgttttaaagtcaaattagaggtgtttattttacttggaaaatactttttttgccttgggtatcctgaattttaagtgaatctgctgagtcttaatgactactactcatctgacaaagggctaatatccagaatctacagtgaactcaaacaaatttacaagaaaaaaaaaaccccatcaaaaagtggacaaaggatacgaacagacacttctcaaaagaagacatttatgcagccaaaagacacatgaaaaaatgctcatcatcactggccattggagaaatgcaaatcaaaaccacaatgagataccatctcacaccagttagaatggcaatcattaaaaagtcaggaaacaacaggtgctggagaggatgtggagaaataggaacacttttacactgttggtgggactgtaaactagttcaaacattgtggaagtcagtgtggcgattccttagggatctaga

SEQ ID NO: 30 - DNA, 499 bp, Homo sapiens
  source 1..499: mol_type = other DNA
tgaatcctaacccttccacttactagctgggtgactctgagcaaattgttacttctccatgcctcagtttgcttatctgtaaaacaggaataataacagtacctacttcacagagttgtgctgaagagataataccatttaaaactctttagcgccgtctctggcataagtacttaatatatattagccattattatccttaaataggaatcaaagctgaggaaaagcatgttgaaaactgtgtctgggaagattattctaatgcagtgtttttcaaactttttgaccatgaccacaataagaaatatattttacattgcaattcagtacacatgtaggtatatgattgtaactgaaaaaaaaatgtataaaataatgctaacttttacaacatgcagtccattcttattactttttattctctttcatcttttaaaaaactctgatcacaatccactaaatgtatttcacaacctattatttgaaaaattctaaccta

SEQ ID NO: 31 - DNA, 499 bp, Homo sapiens
  source 1..499: mol_type = other DNA
gtgagttggctgccggtgagttgggtgccggtggagtcgtgttggtcctcagaatccccgcgtagccgctgcctcctcctaccctcgccatgtttcttacccggtctgagtacgacaggtccgtgcagctgggggacgtcgggtgggaattatgggtgggcaggcccgggacctggccgcgcggcctgggttctgccgtgtcatggggctccccaggaacccgagactggccggacctggggatgttatgccctcctcaggcgcccgccgtccttccccaagctagaccacatcggcggcacttgtcctaccgctgagtcacccctgggtcctaactcggtgcggaagcgagaagctccggctggtgcttggtaaagaaggcgtgaggagccggaactcctaccttgaacccggagaaggccaagggtcactctttgctccgttcatcttttcgtgcctagtatgactgccttgaacaaacaaacaaaaagttaaacgt

SEQ ID NO: 32 - DNA, 499 bp, Homo sapiens
  source 1..499: mol_type = other DNA
ggagcagagccagagtgtgcagagacagaggaaaaatccaaagaggctagggtctctgtcccagacccccagacaagggggtctcctggccttcctgccttcctgggaggtagctatttggcgacggtggaattttcccgggacaggcccctccctcctgggctgggattctcggttcttccccctcctcccagagctgggctaccccgggagctgagggtcagatgtggaaggaaagtgggtgctgggttttcacggagtatgcctgccctgccccgggaggactgtgtttgagcttggactcgctcgctgctgaattcctgtttgttattcttttttcttccaggctagctggaaggaccagctagcctggactttggcttctttgcccgggagccctggcatgatggggtgagggctcttggtgggttagtggagagctgggggctggcccttccccatcttcttttctacccaccccctccccgccccccgccag

SEQ ID NO: 33 - DNA, 499 bp, Homo sapiens
  source 1..499: mol_type = other DNA
tgagtgtgtgcttcctggcctcaggatagatgctgggctctgtcttgccacctctcgcccaaggtgctggtcccctcagagggggccacctcctccggcatcctctctgtggtggtgcccctcaacctcagtcccagggacagccggcttggaaggtggggtgaggggtggtggggggcggggggtggatctgagatatctgtgccagggatgctgtcctctgtcacaaggagtgggcatggtgtgggtgcagcaagaggtgtgtatgcacacgtgtcagcgtgtgcatgtgctaagactgcgtgtgaagcatgtgtgaatggagcgggggtgtgtgggactgactgttttgtggactggccactctgactggcgcctgtgcctttaccaggcaggcttaggctgttctgtggctagttccactttttaggaccccacatctagatccccctcactgggggtctgacatctgggcacaaccattgctggctggcatccc

SEQ ID NO: 34 - DNA, 499 bp, Homo sapiens
  source 1..499: mol_type = other DNA
gtgacgtcacgacagagtgccctttctccccgcctcttccccctcccgggagctgccagtacttgacgtggcgtcaccgccctctaccctcgctttgcgtgcgtgtttgcgtacagcggaggtggcggcgcgggcaggtcggagctcggagctgctgttctggttctcttgtggccgccgtcgctgtccggctgccttgggctgccgaacagacaaggcgtgggccacagcacctcagaagccgacgcagctcgacgcaggggccggcaggagggtgggcgatcgcgtgtcggagggcgccgcgcgggcaggcgggcgggcgccagagggggaaagaggcgggggcggcgggtcagccgctggccgggccggccggggaatgtcgatgcctgacgcgatgccgctgcccggggtcggggaggagctgaagcaggccaaggagatcgaggacgccgagaagtactccttcatggccaccgtcaccaaggcgcccaagaag

SEQ ID NO: 35 - DNA, 499 bp, Homo sapiens
  source 1..499: mol_type = other DNA
tgagtgggtaaatctggcagaacttccatcaaatctttgggagcagtggccgctttatccaacaactgcgtgatagctgggaggcaagagaaaagaatgcgtgaagctagctctgatatacaggtgaaagcgatgagggtaacatgaaactgaaaatctatgattttcactttctacagcattccaattacttcgaaatatgtaagaaattgacatttggaggttggtgacagcagacactgtcatggatacaggtggatcctagagtcatgtgaatagatcacttaggcatccctggagaaaggagcttgggtgggttggagtagtgggtggtaagggaagattgctcactcttgactgtacttttgaggcagaacaagtttgatctattgtgctgtaggttgactcaaaggacacccttcgaattctctcataaatggcaacctttggagattttagtctgactagctctccgagtggtggaattgggatccttatt

SEQ ID NO: 36 - DNA, 499 bp, Homo sapiens
  source 1..499: mol_type = other DNA
gtagttggaatgtgttggaggcagggcagtggattcaggggaggggtggggtgaggaaggagggctgaatgggaagagcatccttaggggtgagaggatatacatttccattttctcctctaaaatctggtagctttggccgggcacggtgactcatgcctgtaatcccagtgctttgggaggccgaggcaggcagatcacctgaggtcaggagtttgagaccagcctggccaacatggtgaaaccctgtctgtactaaaaatacaaaaagttagctgggtgcctgtaatcgcagctactcaggaggctaaggcaggagaattgcttgaacccgggaggtggagctttcagtgagccgagatcgcaccactgcactccagcctgggcaacagagcaagactccgtctcaaaaaaaaaaaaaaaggaaaaaaaaatctggtagcttttgtatctactcctcaaagtcttaactgttaacctcaatttttggtctcctttc

SEQ ID NO: 37 - DNA, 499 bp, Homo sapiens
  source 1..499: mol_type = other DNA
tctcatgttttctgtttagggggtgctgcaggatggggtggggactggcacagaagcttctctgggggtaaaggaggtaagcagaattgcaagtggttagggcacaggctttgaggttatgggttttgaatctcagctccaccacctgcctctggcctctggcaaattacctctatgagcctggttgtttcctctgcaaaatggaggtgataatagtacctgtgtcatagggttgatgtgctagatcaatgcatgtaaagcatcaattgccttggcccatggctggcattgaataaatgatggttactgatattattaataaacaattataagggaggttgaggaggagtgaaaagccttccttttggataccttggttggataccttcggaacaagtctcatcctgggctatctgaaagccagctgatgggacagggtgggctgtgggtgggtttcactgtggccaggctcatgttgctctctcctctcctggctcca

SEQ ID NO: 38 - DNA, 499 bp, Homo sapiens
  source 1..499: mol_type = other DNA
aatcgaccacggaaatttgacacctccgggcttggaagcagctctctcctccttccccgctgcttataaacctcagccctgaggctccagctcactctaccccatctccttgccgggtgagtctcatggctgaccctggagggaggctggagatcattttttcttcctgggctcccaggtccctcccccagagccagctcagacaggaattcaggaaggagctttggatgatcgagcaacagcgcgtgcaggagtgtgtgacggggtggacagaaaagagaatgcctcttccagccccacccgccgcaccccagggggttgtgagtgcctgtactaaacccgtcctggagcagggagtcagagacgccccgttccaggacccttgtcaccgggagacaggagcggggaggatctgtggggtcctgggttcagcactctgccctgctgccgctgaggagaggtaagggtggagcggggcagagaaaatgggtctgttcag

SEQ ID NO: 39 - DNA, 499 bp, Homo sapiens
  source 1..499: mol_type = other DNA
tggctgtgctggttgagcccggtaaggggggaattctgctgagggggtcttagtctgtggctcctccatggggcctcactgagaggaccctcagtgagaaacttagtcttgggagtctgagaacccacagagggatttcaatccaggactcttctctgggggtctcaacctggatccccctctgtgtgtggggcctcagcctggggttctctgagggatcttggtctgtagcatcctttgtgggatctcattccaaggggcctctgtgtgtgtctcagattgggcctctcagtgttgagctcccttgattggttgcctccctcttcccccctcagcatacacactcctgattagacatgggtatggtggcagcagcccccagtattgagaggactaggaccctgggacccctgccgaacgagatctgtccaggcagctcctctccctgaccaagtgggggcgctcgtgtggctggcagggagcccgggtccagacctga

SEQ ID NO: 40 - DNA, 499 bp, Homo sapiens
  source 1..499: mol_type = other DNA
actgaggcacgagaatcgcttgaacctgggaggtggaggttgcagtgagccaagatcacaccactgcactccagcctgggcaacagagcgagactctgtctcaaaaataaataaataaataaatataaataaataaaaaataaaggactttactttttgtagtgatatgtataaaatatttaaacagaagtaaaagcaaactaatggaagtgttttagacatggatgctgagtggagaatggttaagtcaatcagtcatcccagctttcatctctagtgtcctgatagcactccatattgattagatatgaatgctctacccttctatagcattcctgggagatggtcgggaagaagaagggagtctcaggccagaaggatggtggccagacggaatccaatgaggaaggcaaagaaaatcgagaccgggacagagactatagtcggcgacgtggtgggccaccaagacgggggagaggtgccagccgtggacgagagt

SEQ ID NO: 41 - DNA, 499 bp, Homo sapiens
  source 1..499: mol_type = other DNA
tcagtaatgtctagactctagggatgtgccagggccctgctagtcaggacctaggaaccattatattatccttttgcttttcttgccgtcgtctgttctgagaccttgacatctcttgcatgtggccttttctaccaactgccaccagtctggcatgagattaccctgtagtcatttataaagttaaatttgacttgcagctctccattaaggcacattaccattccctgagaaacatgttcccatccttccagctcattttctcttcgttgtttttttaattcccaataccatattacataccatttatatatttgtatatatcctgttgactgtgctctggccatctgtggtttggtttttttgttgttgttgttgttttaatttttatttttatttcagttcgaggtcaggaaaatggattggatggcaccaagagtggagggccttctggaagaggaacagaaagaggcagaaggggccgtggccgaggcagagg

SEQ ID NO: 42 - DNA, 499 bp, Homo sapiens
  source 1..499: mol_type = other DNA
gtaagagcctctgtccttctcggctacacctgcctgggctggaacgcgcggcccatgcggcctctccagtctctggcgttgatgttagaggaagcgtgggggcgccccggcagggcactgagggtggccgcagggctgggtggggacgcagctggtaggggcacagtggccggtctcggcagccttccaggaggcggacgcccgggccggtgtacttttgtgcgtgtgtgcgcgcccgtgtgtgcgcgagtgtgggcggcagaggctgcgcacggatgctccggcgctcgtgccagccggagcccagcagctgggtaccaaaggcccaacagctgggtaccaaaggcccttgtttccctctcgccggctcccccgcctcggagagtgactggagagtgagctgcctgggactcgccgcggtaggcgcttttgctgcgccttctaccacaaactgcgttaggaccggccctttatcccagagataacatcgccgccctgg

SEQ ID NO: 43 - DNA, 499 bp, Homo sapiens
  source 1..499: mol_type = other DNA
ttcaggatgggagttacttctgatggagaggcagtggcacaagatggggaccacttacaagctgatgaaagttaattgataatattttagttcttggttagcatgtcaagttaaagaaggtgttcattatattattttaaaaatgaattcgtttaatttaatttaaacgggccattcaaagactactggttataatgtattattggctaattctgtggtctttttaaaagaggattgtacctacgtatcttctcaggccttccggcccaaccacgttataaatgactaaggagttcaatcaaggccatgggcaaaaatgcagcatcctaaacccatgtacctactccccactgtacccaaaacagcggcattaacacaacgtaaaaaaccaaggaagacgtagcaacaaaaaccttaatttcctagagcgcaaacaaaagaggttgaatcacgtggttcttcctcccacgcccggcgcgccaatgatgtcaccaatctg

SEQ ID NO: 44 - DNA, 499 bp, Homo sapiens
  source 1..499: mol_type = other DNA
gtaagggacggagcgggaagagggaggtgtgtgtctcgcgggtgggggcggtggaagctccggcacctcctctcaccccgggccccaccggcttgggcttggcgtggcgaccccccatcactccccaatcgctggcttggtcgttccccctttgtccccgccatccggcggaggggacgggagggggtggtttcccggcttcctcccaccaccaccaccacccctccaagacaaaagtcagctcctcctctcctcgcaaatggactttccagctgtgattcagttctcccctctgggtgggcgggtggctggggtcgggacggccgagggacggcttacttcccccaaaccatcacctctaggtgaagggagcagaggtctttgtgtagctgggctcctttcctccatcctgagcccttctgcctggaacatagggcctccatccctatctgccccgccagcctcctagctcttccttctcccaacctgaaacccttag

SEQ ID NO: 45 - DNA, 499 bp, Homo sapiens
  source 1..499: mol_type = other DNA
acaaaccctggcgtcccgtcctgcgcgcgggcaccccgccctccctccgctccgcctacccccttcctgagcttgggcgggggaggagactcgggtttgaggaactggtgctgggtgccgggcgaggggagtcagacttcctgtccccgagaccaacgcgtgcgggccgaacccctccccccgccttcccccaacaatacaggacgccggggtccgcgccgcgtcctccctggtccccccgtccgattatgtctcggatcgaatccctcacgcgggcgcggatcgaccggagcagagagctggcgagcaaggtgggctcggaaacccctctcctttcgccgcggtcctcgggtgctccccgaaccccggcacccgcggtgcatctcctgtctccccgcctgctttctgggcgccaaaatcgggcggagcggtggatcggcgagcggcgggacggggtgggtggggactgcgagcgagtgggtaggggtggggggagcgg

SEQ ID NO: 46 - DNA, 499 bp, Homo sapiens
  source 1..499: mol_type = other DNA
agattcctcttctggagtttatttgggagcagctgggatgatggggaccccacatccatagggctgggaggtcagggcaagggcaaggggaagaggaaagaagggtgcctggagaggagcagaactggggttgccggccaggccagcagagcgacaccctagaccgggccgtagaagcgccgataggcctcctgaaagccgatgtggtcagccaactcgtcacagtccggattgagctcacacacctccctcctgggctccaggggatccgggtaggggactggggctctgagacacccgacgtggtggcatcagcccccgtgcaaaatgcccatccctcctctccctacacatggggctccagggtgcccaccagggcaggctgcctgtacccccaccacaacccagagaggccactccctgctgcagctcccccacagaccatcccggagaggcagggccttggcccagctctgccttttctctcaccccagccatt

SEQ ID NO: 47 - DNA, 499 bp, Homo sapiens
  source 1..499: mol_type = other DNA
gtgctggggcaggggccacggctgtgggcaggaggccctgagcaccagccatggctaccatctcttctgcgcgctgctcactggcttcctcttcgcctcccacctgcctgaaaggctggcaccaggacgctttgattacatcggtgagggcacgcctggcccggcccgggaagaggcaggggcagatgccttcccagagcacagaatgaactgggtaaatgggtattacagccccaggatggaggcaaattataggagggacttccctgtcttcctataacgagagcatcactggaagggtcctccacctgccacttctcaggtagcaaaactagtagcatgtgtgctggggccacatgcacacatgctcattcattcctttcagtcactctgggagtcagggtttcttattctcaatttatgggggagtagcaggcccagaggatggggtgacttgcactgggaaaggtgtggctctgacctgcccatcctctccaca

SEQ ID NO: 48 - DNA, 499 bp, Homo sapiens
  source 1..499: mol_type = other DNA
agtatctcatgagttatctttctccgtgaaaaccatgggctagagaaggggactgcagacaccgaggggaactgttcctgtcatccagaggctgagaaacatggtggtctgctgtttgaggatgtaacaagccatgagttccccaactggttccagtattgcagctctgatttacagcatgcataatcttacagggttctggagtgacttcaccccacaggaggaactctaacaggaagctgaagtcagtgttgccctaggtatctgacaatgaagctcacgaaatccaaactattttctgagtagctcttaggctactatgtctaatgacccagaaaagtgattgaataacttaaagactgcttaaactcaggagcagttattttttccccacccaccatactagaccccttcccccaaagaagctggcctgggattggaaggtaaacatgaaaggtgccagtaaaatcctagctttccattctcttgatttccccag

SEQ ID NO: 49 - DNA, 499 bp, Homo sapiens
  source 1..499: mol_type = other DNA
tgagactcccaaaccccagtgtctctacagcatgcttccttgcaaacaaacctccctagatgggtccctgaagcagctgggagccaggcaagtctccaagcactttaggaaagttcagcctgtgttcccctggcaatgggataaaatgtaaaaagaaatgggttttaatcctttgtgctctacttgctgtttgatctaggacaaggttcttactctctttgagtctgaattttctcttataacagagagatgatcataccccttctacttacctcccaagatggtgtgaggaaaacacaagacatgcatgtgttataatttccaaaataagtaccccagttgcttacatgctctcatcttcatcctatatttcatcctatatttcaacttccttctttgcgtctctgagactcacactatttctgtggccacccaattgtgctgtaagtggagggtcatatatcatgcctgtgctatggcattgctcctcactgccatg

SEQ ID NO: 50 - DNA, 499 bp, Homo sapiens
  source 1..499: mol_type = other DNA
ggtgcccaggggtctggcttctccaaactctcctcctgagccctcctttcctggatctttgtctctccctgcctgtgtcttctgcagcttctctggcctctccctctgtaggactctgtctgggccgcttctgtgcctgccctgtctctgccttcttccgctgtgcctttgtctctgtctctttcctcctctgtctctctcgtgcatatgtgtctgtgggtctccctgtgggttctccccagcctctctccgcgccagctcttttaagcatggtgagcctctgcgattgattggctgatctctaagccactcagctgagctctgtcggtgggactcagatgggtgtatcatcgcttcccaaaaaaatgggacttgcccaggggaggggaatctctagcagccgaatggataataggcactgggccagctgatgacatagccttttcccaaaccccacaatcagccctcagctgtctctttccctttttggtgggacaga

SEQ ID NO: 51 - DNA, 499 bp, Homo sapiens
  source 1..499: mol_type = other DNA
taaggaggcatcaagagggaagaacaaataaaagaggtagcttgacatggctcaggatagaactgagcagctgggaagagtaaaaaaggcagaacattgggggaggcaaggagacagtgatcagggagttgactgcccaaaggtaggatgatcctgcttggaatgaacataacagaggcggcagatgacaaggcaggaggggttaacgacttttccttttatagaaggcggatccagggtggcacctcctcttttctaacgtcccttctctccctcaggatcccccttcctgagttaccactacccaccccctccaaagcccagaacagccattccgcctccatttccccccagggttccccctccccacttcctgactccccatttccctggcccagctcccagtagcttcccccaggcttttggccctgctcctacccactcccaactgccctaaaccctcccccagcctcaagtcagccagcccccagcataggca

SEQ ID NO: 52 - DNA, 499 bp, Homo sapiens
  source 1..499: mol_type = other DNA
gatcaaaatgatatttagagcatggttcccccttcctcccactgttttgttcaatcctgaattctcagatatttctggtgtcagcctttttaaaaccgtcaggttgcaaaggagtgatacatttgttgatgatttgttttctttcatattttgtctttctgaacgcattgggcttggtagcacttggtgactttaagaacaatgagataccgaagtgtgcctgaagctcatcgttgcagacattttttgttatcagtatcttatcatagatttctgatacaaagcagtgaagaattcaggaaaagacaatgtgggaggcacagacagttgggggagccaggacagcattgctctttgtatgtccttttatttaaaggcataacagacagcaacaccagaggtctgtgttcatacacacatgtgctgctgcttaggctgaactaagcaatcacatgggaaactattgtaaactgatttctggtgtcgctgttccccctag

SEQ ID NO: 53 - DNA, 499 bp, Homo sapiens
  source 1..499: mol_type = other DNA
tcagttcacacgaggtataggaaggagtctaacatttatttttttcttaagcctcacctagccttttattcacaccaccaagtctaggttagaatgtatctgagcagtgaaaggaccagaatgcatagttatcaaagggcagtttttcccttgctaaaacctaaattcattttttagactctgctagcagttttagatataatgttacaacatgtgttttgttctccaggacctgatttaaataaatgtgataaaaataggctaagttttttgtcatccagggctgcttccaactgcaggcagatgtgagaactctgcctcaggagccactgatatgcacaaagtgtatgtgcatgtgtgagtttgcgtatattagcttaatagatcgcagtcattaatgggtggcctatgcaaaggaatcttaaaataattataaccgtaatgtaaaacatttggggcctactttatttcttggctccaagctaagtggaaaattcct

SEQ ID NO: 54 - DNA, 499 bp, Homo sapiens
  source 1..499: mol_type = other DNA
gtgaggtctgattatttgccctgtttaaacaggcgtgaacgcggtgccccaatcaggtgggacattggtccagtggaacttggctattggctgagcggggcacccagcttgaaagtcctgaggttctttttttcactcttcttcacagtctaggtagggcagggctgagatcagaagccggcaatggccaggcattgtggaattaggaaaagcatttgagagggagtcagcaagtctgggtttgagtcacacctccaccatctggtagccttgggatcacaggtgatctagcccagcagttctcaatcagatgattacagcccccccagggggcatttagaggtgggtgaaggtgcttttgtggtcccaataacaggtgtattaccaacactgttacagggaccatggatgctaaatgtcccacccaaaatcccagagcacccacattgagaaacattgaatttgcctcattaaatctgtcttttctgtaaaaacaaaa

SEQ ID NO: 55 - DNA, 499 bp, Homo sapiens
  source 1..499: mol_type = other DNA
tgcacatcaccacacccagctaattttttaaatttttggtagagacagggtctcactgtcttgcccaggcttgtctcgaactcctggcctcaagcactgctccagccttggcttcccgaagtgctgggattataggtgtgagctccatgcctggcctaatgtagccctttctgttccagtttgtagcatttttctgcttgtcctttgaagagtctataaatagcattggaaaataattctcatatttaaaggcactgctgggtcctccatcaggtttctcctttcgaggcacatttagggggcggtggtcttcactgctgtccttcctgcctattccagggagccctgtgctgtagctcctctgtgttctcaccactcagggaaaaagcagctgtctgtccttcactcccagccagtgccctgtgcagacccaactcctttcatccacctgaggcagcccctcctgcaactgtcattctccttctctgaacttgctcca

SEQ ID NO: 56 - DNA, 499 bp, Homo sapiens
  source 1..499: mol_type = other DNA
taagtacttccctaaggggcggggaagaacgagtgagacatgggcggggcagtcgcctcatgacgtcagtctcgcgcgcgggcggaggtgggccggtgcggcgctgtcacgtaggttcagtgggcggaagaggtggccccggatgctgcggcgcccgctggccgggctggctgcggccgccctgggccgggccccaccggacggtgagtacgacaagcgcgatcgcgagggtgactcgggtcgaggcggcagcggtccctgcgctttgcggtcgcccagtccacgccgcctccggatctcctcctagccgagacgccctgtgccgcattcaactgtgggccctgagaacgggggagctctggagggcggacgggctggcaacgcagcggagcccgggtcccggagggcggggcgctcctcaggagctgggcaggccggcagttatcgcagtgtcgagctgctccccgggcgtataggagcgctcggtgtcttcccgaca

SEQ ID NO: 57 - DNA, 499 bp, Homo sapiens
  source 1..499: mol_type = other DNA
gtaagtagaggaaactcccagagtaggagcctccatctgttcacaacagccaaaaggtgaaaacaacccaagtgtccactaacagacggatggataaacaaaatgaggtctagtcatatgatggaatgtgactctgctttaagaaggaaggaaattgacacatgccacagcatgaatggaccttgaagacgttaggctaagtaaaatcaatcactcacaaaaggacagtactataggattctacttacatgagatgtctagagtagttaaatttataaagacagaaagtaggatgacagttgccaggggtcagggggagggggaatgaggatttggcatttaatggggatagagtttcagtttggggtgataaaaagctctggagatgaaggttgtacaacgatgtgagcgcatttaatgccatggaactgtacacttaaaaatggttaaaggccaggtatggtggctcacgcctataatcccagcactttgggaggct

SEQ ID NO: 58 - DNA, 499 bp, Homo sapiens
  source 1..499: mol_type = other DNA
ctaaccaagcaagccaacaggattaccatagggtgttggagaagggaaagttgtaggtaagatttaaataaagcagtgtttaataggctcaaagcaaaacacaactgtgtataaaggaattacggtcagacctgggctacgaagtggatggaggttcctctttccttggaaatgatgaagttaagacaaatgtgcaatgttgtgtccagaaggccctgggttggaaatcaaggcagcttctcagtgttaagatgacccaggtccttcagacaaaagaaggatgttccattcttactctatttatctcaaatagcacagtttataacagtctgtgctttttcaggaataagatttttcagcactataacttttcgttgattaacaaaagcagttttagcaggttcacagatgtaaatacgtggagcctggcatatggtgaacattcggtaatagtttccccatccccacctcactcatctcctcttctctctcactttca

SEQ ID NO: 59 - DNA, 499 bp, Homo sapiens
  source 1..499: mol_type = other DNA
tctcaaactcctgacctcaggtgatccacccaccttgcctcccaaaatgctgagattacaggcatgaggcctgtagaaactgatttctttgggcctcagtttctacaactgaaagatggattctttgatctgcaaagtccctttaagtcctaagatattttgtgaacagacttagctattaactgtgcactttataaagccctttccttcctttaagggttcagtgaacagtcttgctaggtggtcaaggggctccctataggtcctggcccagtacaaatcctccccgtactgtggaggggctgacttgtacacagtaaaatagagcacaacttatatctaggacagctcccttgaggtgctaccgctgtcaaaggaattgtttctcagatgaccagggtagacaggggaacagggactgagggaagggaggggcacccaagagaacattatgagcatatgtagattgcctcatctcattttctgtgtttatgtgaag

SEQ ID NO: 60 - DNA, 499 bp, Homo sapiens
  source 1..499: mol_type = other DNA
ttcggaaggagtatggggccaatgtgcttcctgcattccccccaaagaagcttttctctctgactcctgctgaggtagaacagaggagagagcagttagagaagtacatgcaagctggtgagtggttgcaggaaactaggttgactatattgaggactatggggagagacttaaaaacagctggttctgtggaagggcctgatttaatttctagatctaggaaggctcttgtttgatctgttatgcagttagcaaagtaaatagtgtacgaggatgtgtaactctgtgtactagcaaaacaatttgggcactaacatctatgagaaatactagtataacactagtcttaatatcagtggagagaacttaatttgtatctgatgtgctttagattaacatcattgttatttccctagttctatagactggactcacctagatggcagccaagggtggggcaggtgaagaatttatgcaaacagtgagtgaggtgaggcca

SEQ ID NO: 61 - DNA, 499 bp, Homo sapiens
  source 1..499: mol_type = other DNA
gtagagacccactctggccgggggttaccaggctggtgggagttggagctaagggagcagggtggagggggaagccaggactggagatgggtgatggggggatgaggaaaggggaagagtaggaatggagcccaattttcaaccctttccacttggggctgatgagattttttatggtccccacaggagccatccctgggcaggctccagggtctgtgccaggcccagggctggtgaaggactcaccactgctgcttcagcagatctctgccatgaggctgcacatctcccagctccagcatgagaacagcatcctcaaggtgagggagccacggggaggactgggatgggagatggagcatatttgccccattgatgatagatgacaggggcctcctagcacctcttaccactatccttcttttttcatccacagggagcccagatgaaggcatccttggcatccctgccccctctgcatgttgcaaagctatcccat

SEQ ID NO: 62 - DNA, 499 bp, Homo sapiens
  source 1..499: mol_type = other DNA
aacatagttctgaatttatgaaacttcccaccaaaaaagaaggtcttttgcctcagagcaatggggaatccttaggagcaagggagtgtgtttgcatccccaacttaagctttgctgctggtgagcactaagggtgcagacatattggggtctctggagcattctccgtgcccttcttggagatggcatctgagacagggaggcaggaacagcctcatgttccaagtactttgtacagtgcacactctctttgccactgttcttcacacattgtaccctgtcttgtggcctcactcctgtttggtgtctttctttaacacttatctgctcgtccccaaagataggtggcagagagtcttgttagagaaagtatgatgattaggaaaagggttttcctgcaggttgtgtccaggattcctctggtgtgtccccgtaacccccaaatcacctaactcctctctcctcttttcctgctcccccatgggctatcccgagcaca

SEQ ID NO: 63 - DNA, 499 bp, Homo sapiens
  source 1..499: mol_type = other DNA
gctcgccccgcccacagttgccccggcaaccgcgccgcccgcggcacgttccggccgctcaccccgcccaagggccgtgcgtacgtgcgtcgtctctatggtggcggcggatttggagggaccctacgaaccaggagtcaggcgagccgatctggggctgcaggtgttacctctgatctaggccgggggcttcagggatccgagccgagggagaaagccttgggggcttcatcacacttatttggctcgcgggcttggggccatcgggtggtcctgtgtcatccccattcctcctctgcgattcccccgtcgccccaaaacagccctgggactcccctgtcttgctcctcgagaccctcccccatcaccgtcctctgggcaccccatcctatgacccagtctcaggcatcttccgaaatgctcgatgatagccgccctcgggcatctccgctgcgtctgtttgtagcgcgcctggtgattcggctgcacccccacacag

SEQ ID NO: 64 - DNA, 499 bp, Homo sapiens
  source 1..499: mol_type = other DNA
tgaggcatggagctgggagtgatgttgctgaacccagtcctacccccagccttttctctccaaaccttcaggagcaggcatgtcctaacctcagaatctccccaggcatgtcctaacctcagaatctcccctctcctgccgggcgcggtggctcacgcctgtaatcccaacactttgggaggctgagacgggcacttgaggccaggagttcgagaccagcctggccaacatggtgaaacctcttctctactaagaatacaaaaaaaattaaccgggtgtggtggcgtgcacctgtaatcccagctacttgggtggctgaggcaggagaatcgcttgaacccaggaggctgaggttgcagtgagccgagatggcgccactgcactccagcctgggccacagagcaagactccgtcccccaaaaaaaaaaaaaaaacaaacaaactcatcttccctgctttgattttctccctacactgatgcacctccctccaggtccac

SEQ ID NO: 65 - DNA, 499 bp, Homo sapiens
  source 1..499: mol_type = other DNA
gtaggaggaagaaaggaaagtaggagtgttgaaaggtgaaggtggcagggtggctgccagcgcggctggctggtaccctcctgggtgggcaggcgagggctggctgtggtggcctgggaacagagacccacatttctggataccacattgtgccagggtggagttcccccagcctgctgtcctgccagccttatgccaggctccaggcacctgatctgatggcagctgtgaagctgcccgggaggatgggtgggctgtgcccatgctgcacatggaggaactcttgggtcagggcttgtcccagctgtgccagacctcctgacggaggccaccacactgctcctgaaggccctcagccagactggaggtgaaatcagattagaagctgcctgtccccaagacaggactgtggtgtgatgctatttgggtgggagtggcttggggagggggcagggcagtcctagccatttgaattcaaatgcaagtggcacatttgatt

SEQ ID NO: 66 - DNA, 499 bp, Homo sapiens
  source 1..499: mol_type = other DNA
agaatgttttatggcctcagccattccctgagaactgagcttagccaggtgcagtagcccacgcctgtaatcccagcactttgggaggccaaagtgggaggattgcttcagttcaggagttctagaccagcctgagtagcaagactctgtctccagaaaaaataaaaaaattagtcgggcatgttggtgcaggcctgtggtgtcagctgctcaggaggctgaggcaggaggatcgcttgagcccaggagttcaaggctgcggttagcggtgataatgccacggcactccagcttgcgtgacagtgaaccctgtctcaggaaaaaaaaaaaaacaaaaaaaaccaaaaaactgatcttaaaaaaaatcaaatacttgcattcagggcaaggagaaagacaaactgagggaggaggaaaaagtaatgtgaagccagtgaccctgcccagaaaatgtgactaacccagcagcggtgggggctgtgccgcgcctgccccaggc

SEQ ID NO: 67 - DNA, 499 bp, Homo sapiens
  source 1..499: mol_type = other DNA
cagcaaaactaagcaccctacttccgttgtccccacctgttcccggcgtccccttcggctactcccggcgtttgcgcaagcggtcccacgtgggctcgggcggggctagcgccgcggcgggggctgggcacgcccctagcgcatagctggcttctgattggctttccggtgctcgcccgagcagggttggggcgagtggaccgcgcctctaaaggcgcttgccagtgcaatctgggcgatcgcttcctggtcctcgcctcctccgctgtctccctggagttcttgcaagtcggccaggatgtctcaggtacagcgcgtgcacagccaggctgcgaaggtgcagcgggcgggaggcccgttgggggctcagccggctgccagaagctctcgggctctttccttccgtgcccctcacttgctcatgggcccatgcctagccctgattcgttggacagagccttgtgagcgggattttccgtttggggatttctaaatctgc

SEQ ID NO: 68 - DNA, 499 bp, Homo sapiens
  source 1..499: mol_type = other DNA
acagggcaggacgtcgcggcggagtggggaagcgaggagtccgtggccgagagcttggaggtcaggggaagtacggggccggctgctcagagtgcgggacgaggagaatcgcggcccggggagaggtgacccaggggcccctcccttctctccagtgtagacccttgtctgagaccgagctatgtggggcgacctctggctcctcccgcctgcctctgccaatccgggcactgggacagaggtcggtgttgaacgcgcgggccccagggggagggaggggaccaacgggctccggcgctgacaccgcggcactcatgccctgtcccctttcagctgtttccagcatactgtgccccgtctgtcctcaggccagggcttcgctgcagccccggccactccctagtgcctggcccggtggtggccaggcagttggccgcgctgcttctcccgcagaggggacccccactgggggcgaaggcttggcctgccctcttcactg

SEQ ID NO: 69 - DNA, 499 bp, Homo sapiens
  source 1..499: mol_type = other DNA
gtaagtgcccacctccagcccctgtctggcttgtccccagtctctaggggtgcagcatggaaggagagccccgaggaggggttgcaggagggaccaggccaccatggatgtgagggtgaggacagggtcctgagctaggctgccccagcacgggcttgtcaccaaggctgccagggatgagtgagcgcagctgggcgcatcagcccctcctgcttgcccaccccagcccagcctcccagcgcaggaggagcatttagagcacctactggtttatgccaggcactttccagaatcttctcatttaatcttcgtcatcacctttacagccagacacttcctccttttacagatgaggagatgggggctaggagggttgagtaacttggttccagcactcagaagtggccaagtctgagtgtcggcccaggtcagcccagctctggggttcctgcagggcctgccgtggtgcccgtgctgcggtgcccgtgctgcggtgccc

SEQ ID NO: 70 - DNA, 499 bp, Homo sapiens
  source 1..499: mol_type = other DNA
agaggctcagggaaggctcagtacttgcccaagaactggtcatggtagagccagaattccaacagggtctcctgggctctgtccctgagaccccctgatacaggcagagatgctgggaggggcaggcgggtgtgcaggcgcccttggggcatgcgctggcagcccaggctcctgggagctctggaggctccaccgcaggatttccctctggaggaagccagaaagagccagcctggtgcgagctggtagggccattttgacaagtggatttcggtaggtgctgagcttgggcagcacagtcacacctgcctgtccctttgacagtggtaggagagaggatgtgggaggcgggtggctggccgggctccgctggtacccaccctgcccccaccaaccccagccgctggtgacattttctcttgtcttgtgatcctgcccattgcctttccaccccggcctccccgccccctccctgttctctcctcgtggcctgttacca

SEQ ID NO: 71 - DNA, 499 bp, Homo sapiens
  source 1..499: mol_type = other DNA
actgctttcttttctctctggtaggtcagcaaaactggtgccgagggagctgttcttgacgaagctaaaaatatcaataagtctttgtctgctcttggaaatgtgatctctgctttggcagaagggacagtaagtgatcctgcccccatctattaagtaatattatgagaaaccaccttttggggcctcatagtccctttgccacacaccccaaaggctggtttgtttttctgtttggaagaggacagagggaatcctggctatggatgcctgcttgctgggagttcccatctactaaaaagtatgaatggtgatgctaatttcctatgacataggtcaaagaatgggcattctaaactttggcaagatccaaagacccagccacaaattcttgttttactcggtttctaagctcagtgtcttcatccctgacttgcttgcctctgtgtttttctcagaatgggctgtcaaaaccaatactttttcttttcctaaatag

SEQ ID NO: 72 - DNA, 499 bp, Homo sapiens
  source 1..499: mol_type = other DNA
tacgtgtggtctctcaggacccatcctctgtgctaggtcttgggtcttaagagtgaatggcaaggctgggtgcaatggctcacacctgtaatcccagcactttgggaggccaaggcgggtggattgcctgaggtcaggagtttgagaccagcctggcccacatggtgaaaccctgtctctactaaaaatacaaaaattagccggccgtggtggcatgcgcctgtggtcccagctacttgggaggctgagtcaggagaattgcttgaactcaggaggtggaggttgcagtgagccaagatcataccactgcactccagcctgggcgacagagcgagactgtctcaaaaaaaaaaaaaaagaatagtgagtggcaaggggctattgtcagagaatcacaaagtaagggacaaacagccttttactaaattacatctagcaggtgatatgtaaacttgaggcatcacttattgaagccaaagcaataattatattttaaaat

SEQ ID NO: 73 - DNA, 499 bp, Homo sapiens
  source 1..499: mol_type = other DNA
agcccactgtttttactgcagcgtgtataaacatttagacataattttaaggttcaatgaatgtgactatcctaaaaaacacagacttttaattaaatacttatttctttagttcctatataactaggaacttgccttcttttcagtagactgttaaaagaagggctttcagctcaacataaactgtattagtcacttaatatcatacactgaaaaattattttgaaaagatacttgggattggggacatttatgataaaatttaaccagaagatggcagtgatgatcctcctatactccctgcaacggtaatcaaaaagttttacaaatgtcatagcatgaaatgtgcacgttcagctgttgttatataatgttaaaagttgaggatctaggggaaagcacttgctgtttattttatatactatgaaaaatgtgtatttttctataagaagggattaagaatattttgggtgtctgtatctttgtctgtacacttcag

SEQ ID NO: 74 - DNA, 499 bp, Homo sapiens
  source 1..499: mol_type = other DNA
taaggaagttcccataagtcttgccttgtttatttgcatgcatcactttatgttatgcataatgtctagaaggcatgctgttttattgcctgtttgcatttttcacccaaattgctggaaactaatgaacattttaaaggagccattcctttagctgcagtcatttctctaaattgatatctttttttgggggggaggcagtgaaatcattttaaacattactttttgaaagaaaaaattattagacaaaagttaatattttaaaataaatcttgagaaactagagattaaataacttaatgaaacatatttcagagttgaattttggcagcaattgtaaataatatttataatctggtgatattaaaagtgaaaagttacaagggggagaaggaatgctctcctttgaaaattagtggccacatttggtgatggatgagatgaagatgcatccttccataatcttgcctttttaaaaaaattataaagctcaaatgca

SEQ ID NO: 75 - DNA, 499 bp, Homo sapiens
  source 1..499: mol_type = other DNA
ggggattttggttttggttttgggttttgtttttttgcggtgggggggctggtatttggaagaatttagctctttatgttacagaaatcttttttgcaaggacttagaaatgataatgcttaagattgttcttgcccaatgtgggaagagaatctaaggtttttatatgtcttgcaacctcatcaaaggaaaattactggcatcattttcataatttgaaaaaaaaagccaaattaatatatttcttttttgattcactttttaagtgatcatttttaaaactttacttttgacccactgaatttatttagatagaaggaaaagagatgatgggagggaagtttagataaaggatggaagttggttttatttaaacaatagccctgtgatttcctaatgagaagtgactagaaattgaagaaaccaaataaggaggatattggtcaatttagctttagtttctcttactctctcaagcctgccctgtttaactccaaag

SEQ ID NO: 76 - DNA, 499 bp, Homo sapiens
  source 1..499: mol_type = other DNA
atacaataagtaaatgaagtctgtgttctgtattacattatttttgtaggatcgtttcacaattttctcacaattcttactttgatagtagagaaaataaaagcaagccaagagacttttttttaaaaatatattttatttgctataaacaactatgatttgcatttctcatgtgaagaataataattatcggctaaaaatggatttgctgcattgattttcaacgtaaatatttaaaagattaatgccagataattttattatactcacatttaacgacaagcaaagctgtttataatgatgactgtccatgtacacagttttaagttgaagtgagtgaatattcaagataattaaatgctacattttcattttcaggctcaagtggtcctgtcgaagtatttatcactgagactccgagtcagcccaactcccaccccatccagtggaatgcaccacagccatctcacatttccaagtacattctcaggtggagacc

SEQ ID NO: 77 - DNA, 499 bp, Homo sapiens
  source 1..499: mol_type = other DNA
gtgagtggccgcagtatgtcatttgattgcatagtttgtgaatgaagcatgagttagactccagggttcaaagtggtgtctgcaagtccaattcaatggcctgtgggttgagaaactcctggaccaaggaagctctattcagtctccctccttccccttcaatctgccattgctcactgtgctcctgggaggtgtttctcctgtagtttgggcaacagaacagaatccagcccctccactgtctcctctccttgccatatctggtctccagcatccttgcccacaggctcttgttgattttgaaggttttcttgctcattccttcctgcttttgcatctgcctctccctttacctggaatgtcctcctcatccttccaggttgattgatctctttgccttccatgcctcttgcttctgccattgccaaagacataggtaccctgttgtccgttatgattggcacatgattacaacttttacacccccccgattacagcc

SEQ ID NO: 78 - DNA, 499 bp, Homo sapiens
  source 1..499: mol_type = other DNA
gcttcagtggttagactttaaccccactccctccttttcttaagaaataggcccctgagagaacagaagacttagtttcttgctactcatagctatcctgtttatactgttctgttatttttatttttgagacagggtcttgcttagtcacccaggctgtatgcaggggcccgatcatggcttactgcagcctcgacttcccaggctccagcgatcctcccacctcagcctcctcaagtagttggtatcacaggcgtgccaccacacccagttaattttgtatttttggtagagacagggttttgtcatattacccaggttgttcttaaactcctgagctcaagcaatccacccacctcagcctctcaaattgctgggattacaggtgtgagccactgcacctggcctatactgttcttacttgctgcaacataaaagattttaaaaacttttctagattcttatggaagtattgctgtatcttctgatttctctttta

SEQ ID NO: 79 - DNA, 499 bp, Homo sapiens
  source 1..499: mol_type = other DNA
gccggctgcggtgaagagagcgcagggtcccgaggcgacccgaggcgcggggcctcggcgcccaccgggcaggctacactgaagggcaccccgaagacgctgggggcgcggggcccagggccaacggccgcaaccccgccgcgatttgggcacggagaggacgcgggctcggcggtgcgcgaagggcgacgggcgcaggggcgggagacccggggtcgggctggtctaagagtcgggcggcggatcctcctgggccaggggcgcggagccgcgcaggccccacagccgccctggggagatggcggagcccggcccgctctcccgagcgcaggtatctcacctggatcaggcgagggtcacgccaagccggctacacaccacggaaaggagcccttccgcgcttttatcccaccgaccaatcgcacagcgactagcaccgattgacaagctccacggaccagccacttgcgcgtatgggcgggactaagctagccagagt

SEQ ID NO: 80 - DNA, 499 bp, Homo sapiens
  source 1..499: mol_type = other DNA
gcccccgggccgggcagatgcggtttcctcccgactcgcgatcaaaatgggtgagtagcgcagagctcgcctcttggaggcctctttctgaaggcggaggacgcggggcggctcgttcatgggccgggtggctccgcagggtagacgaaggctgcagcgtccgcactgggctgggaacgacttgcaaggggagcccagctggcgccccggagccagccagctggctagcggccccaccagcgcaagtgccccgcacctgcccgcctgctccgagcgtcaagagaaggcggcatttcgcatgggtaaaatccgcgcggggacgccgggagaatgttgttgctcttgccgttcggcccattgtacagacgcagccagcgaggctcgcagaggtcagggatgcacgtaggactggcccgcaccttgcagccacggaaagatccgcctggcccgcggcccctccacgcctccgaggtcgagacagtgacataagtcaactctc

SEQ ID NO: 81 - DNA, 499 bp, Homo sapiens
  source 1..499: mol_type = other DNA
gtaaggaaactgaggcaggagaggcgaagcaactcgcccaaggaatgggctgtgccggtagcttctccaaggcctggtgcgccctggcctgtgcgcgtgatcccgggcggggtctcagtacgaacaggggcttcgcgatgtggccagcgcgggcttatctccgtgccgtgacgacaaggctagaagcctgggcggccgcggtggatcctcgtggcgaggcggggagggcgccgggcctcactggcccgctcgaaccagggctgcgcagggcagagcccaagggagagggccgcgcggccgccgtaacgtcggagacgacgcctggcaggcgccagcaaacgcagaagacccgcgagggcgaggcagggagggcgcgacgcgacaacgaccacgtgccccgcccgcccaggcgcgcggcctgccgggagacgcagtccaaacctttcgggagcaggactaggggtcccagagagcctcgcggcgcgcatgcgagccccgg

SEQ ID NO: 82 - DNA, 499 bp, Homo sapiens
  source 1..499: mol_type = other DNA
tttcaccatgttggctaggctggccccgaactcccaacctcaagtgatctgcctgcctcagcctcccaaagtgctgggattacaggtgtgagccactgctcccagcctcttctaggcacttcggaaaagtgcagcgattactgaccacacgaaggccagagatgcagcaggcatctatttacatgcattaaatacatatattatcttcatgcatttacacattcattcaacaaacattactgagcgcctgccgtgggctggcatggtcctgggcacagctccgcttgcaggaagcccactttctcctggggagtcaaagcacaaacaaagccaagtcagtacgtaaagaagcaggggtgatgagagatgcggacccaggaggggttcaaggggctgtcctggacgcatgacagggaagcatagcttcttaaaggactcggcagtgcaccatgagaagacacgcaccagggagcagagagaaacgccagaaccctctcga

SEQ ID NO: 83 - DNA, 499 bp, Homo sapiens
  source 1..499: mol_type = other DNA
gttcaatggtatgtctgtgagatcaaaatgtgttgatgtatgtcagcaggtcagcagtttgttctttttccttgtgtagtattttattgcatgaatgatgattgttttaataataaataataataaattttttattttgctttttagagaaaaggcttttcctaactctagaatattatttagtcaaggatatgtttggttttaaatgttttcctatcttacatgggtctctaaaacataaggaaaacaagagcccatgtttctttttctccttaaaaacacgatttttaaaaatacacaaatgaaaattaatgaactgttagttgagttcctttccacagagttggggggaagttggtcttccagggtgttgctctgtagggcccccctgaatgttaccttggattatgggagtagcagggggcttccagagtagagggctccctttcctgatgtgcgtttatgtctcctcctgtctccttgcatcggcgatttccag

SEQ ID NO: 84 - DNA, 499 bp, Homo sapiens
  source 1..499: mol_type = other DNA
taagcggccgcccagccccgcggcaccagttgggcacagcgcgtggtctcggctcccagcacgcccctcccgctccgcaccccactcttccccctagtcggctccgggttaggctccgacaccggaaggcactccagggagactggaaggtgggtgggggagcagggccttcctacctgtttccagctcctgccagcgtcgcttaagcagcagaggagagccctggctcccgcctccagcttcttttggccctctcagaaccagccgccgtgccaagtcccctcagaggcccaagcaacagccagctgcgccccccgcggtggtcagagcgccagccaagccacggtcccctccgaggtctgagcgtcagccacggtcccctccgaggtctgagcgtcagccacggtcccctccgaggtctgagcgtcagccacggtcccctccgaggtctgagcgtcagccacgtccccgcccagaggtccgaccaccgccagccaag

SEQ ID NO: 85 - DNA, 499 bp, Homo sapiens
  source 1..499: mol_type = other DNA
gcagggactgggatgtgacaggctggagctcagggacttgttgggggaatgggggtcagtgacaggctggaggcttaatgcgaggatggaggcttggctctaggggcagcacctggggtggtcatgggatctcagggaggggagtgggagtcagagaaagggtcttagagaagctggggctttgtgaggagctaagggagactcactgatcgaggtggggaccctgcaggcagaaacctgactgtagtgatagaggtggggtttctccgcacgcaggtcatgggggccttggcaggagcggttttggcagagggtggggccggtgcctctggaaggtatgaagatgtaaatgaaggtgagggaggcaggctgcgagtgagggctctgcgggcaagagccttgatgggtggggtgggggcaagagcagcagctgggatggggcactggtgttcggtggcctgtgaactgtggggggcacaggggcaggcagagtgatggt

SEQ ID NO: 86 - DNA, 499 bp, Homo sapiens
  source 1..499: mol_type = other DNA
accttgacaggtccctgcccctatctggcccatgacccctccatctgtacgaggagaccgtcggctgctggggggcccaggggagatggctacagggctggggatgaagatttaggggaggatcaagggtgggcaaaagggccacatcagccacctcttggccccgtcagcccaagagttgcctggacatgttccctgcttcctccctttaatttgggtcctatgtctgtatccatggagtccttgggaagcccctgagccaggctgaagcgggataggaagggtaaaggtgctagctgagccgtagtacggcccagcagttctccaggggacaagctaggcccccgctggagggagtggtgagactcagccggggcctgattctggtcagcaccttggacagcagccagtgccctccctggccccgcctggccccgcctggccccacatccgctactcctgggcacctcctcaaatagcacagcctccagctggtgcc

SEQ ID NO: 87 - DNA, 499 bp, Homo sapiens
  source 1..499: mol_type = other DNA
gaggagcagccgcgccctaccccgccagccagcctccttacaacccggcctacatggatgccccgaaggcggccctctgagcattccctggcctctctggctgccacttggttatgttgtgtgtgtgcgtgagtggtgtgcaggcgcggttccttacgccccatgtgtgctgtgtgtgtccaggcacggttccttacgccccatgtgtgctgtgtgtgtcctgcctgtatatgtggcttcctctgatgctgacaaggtggggaacaatccttgccagagtgggctgggaccagactttgttctcttcctcacctgaaattatgcttcctaaaatctcaagccaaactcaaagaatggggtggtggggggcaccctgtgaggtggcccctgagaggtgggggcctctccagggcacatctggagttcttctccagcttaccctagggtgaccaagtagggcctgtcacaccagggtggcgcagctttctgtgtgatgcag

SEQ ID NO: 88 - DNA, 499 bp, Homo sapiens
  source 1..499: mol_type = other DNA
gtctagctctttggcaggttcggagcgaccttggccgttggcctgaccatctttgtgctgtctgtcgtcactatcatcatctgcttcacctgctcctgctgctgcctttacaagacgtgccgccgaccacgtcgtaagcgtgcccaccctgccccactgtgaccccctggggtggtaagggaagctgaccaggccctgctttggctaagctggagggatgggtggcaagcctggctctcaagacctggggagatggaggagggtcctgactggaattctctttgcagcggttgtcaccaccaccacatccaccactgtggtgcatgccccttatcctcagcctccaagtgtgccgcccagctaccctggaccaagctaccagggctaccacaccatgccgcctcagccagggatgccagcagcaccctacccaatgcagtacccaccaccttacccagcccagcccatgggcccaccggcctaccacgagaccctggct

SEQ ID NO: 89 - DNA, 499 bp, Homo sapiens
  source 1..499: mol_type = other DNA
acacaggattagccagcgacctaatccgccaagctatgcaaaaggaggcctctgctgacccctggcggtcaccagccggagtctggctgcgcggtgacccaccacacgttgcccagccgtgtggctgggatggtcggtacccatggccgtgcggtcgagccttgatgctccaggacagtcctggaaggcttcctggcagatccgtgggaagaaagccgacagaagggcgggaggcgggaggggaaaggtcccccgggatgggtagggcctcaacgctgggcatcggcgcaggtgtgtactgcagggagccagccagaccccccacggactgcctgaccttgggggaagcccggagtagaggaagaggccggacccccagacccgccattgactatgtccgccattgactatgtgttctgagagaaatttttttttttttttttgagactgagtctcactctttcgcccaggccggagtgcagtggcgcgatctcggctc

SEQ ID NO: 90 - DNA, 499 bp, Homo sapiens
  source 1..499: mol_type = other DNA
taagccgatggcggctatcgcggaggagaccctggcgaggtggggccccgcgcggggcaagggggatggggtgccacagagggctagttgcaagaggacgcgtgacggctgcagctctgcggagaccgggcctcgacggccaaggagtggcaggtcggcggaggcgggggccaggcccggaggcagagcgagacaggagagcaggcaaggcgggggccaccgtgagtgggggccgcgaggcgggggctggggcgcggggaggtgctaggtcggcctcggctcccgcgccgcaccccaggcccgccaggaggcgccgctgccccgcgaagccgttccggcctctcccggccaccgaaatcccgcgctccggcctagagaggccccggaagaggcggtgcagcgcaccccgaggccgcttccggcttcggctctgcaggagaggccagaatcgggggaggacgccttgggcggggcgtgggtgagagaacctgggggaggt

SEQ ID NO: 91 - DNA, 499 bp, Homo sapiens
  source 1..499: mol_type = other DNA
ggcaattgccccccacttagctacccagccaggtctagcagtgccagaggctgtgcctgtgtttgcctcaacaccaattccagagggaccaggcatggggtgatgtggtttggtcccaggggggtgccctgggctgatgcctgttcaccagtgtgttgagggcagacctgggattggaacctgggtctctgtgagtctagagatcccaccttctgtaccctactgcccctagggccctcaaaagaggaatcatgcagtaggctcccaggagggccctggtcccataggatgatgggaacagcctggggctcaggtcctgtgcgtctccagagcccacaggcccctgcagagaatctagaggcaaatactgggacaaggacacctgagccataggcacaggcccagccagcagcctggtgagcccatctacactggctagccatgccccaaggacctgggaggcctggctaacccaaagtagagggacaggaggggcagc

SEQ ID NO: 92 - DNA, 499 bp, Homo sapiens
  source 1..499: mol_type = other DNA
tgtctgtctctttaaaataaaaaaaatcaatgagttatgtgatgggctcatggctacaggtggagaaaggcagtgcatatgcagcctcctccatccttgactaaggctgacagagggctgggcccaccactgctcaccctgaggcctcgtcttctgactcccctcctttcatttctaggtggcattggtgaggctgtgtccagtgcagtagtgggcgagcctggcatcactgtcacccacctggcagttaaccgggtaccaagaagtgggaagccggctgagctgctgaagatgtttggtatcgacagggatgccattgcacaagctgtgaggggcctcatcaccaaggcctagggcgggtatgaagtgtggggcgggggtctatacattcctgagattctgggaaaggtgctcaaagatgtactgagaggaggggtaaatatatgttttgagaaaaatgaattggccctgaaatgttttcttttttgatgtgtttgca

SEQ ID NO: 93 - DNA, 499 bp, Homo sapiens
  source 1..499: mol_type = other DNA
gtatgtgagcattcaataagtacttttatgagaatgagttttgttttaagcttaattaaaaacatgcttgctttctaaaaaaaattcttaatggttatatgtacgaagggatggggaattgggtaaagggtgcatttggaataattcaaaataatctttcttatttgtccgtaaactctaacttatcttctttcttcaacttctaaacagagcagtctgaatgccagaatggataaccgttttgctacagcatttgtaattgcttgtgtgcttagcctcatttccaccatctacatggcagcctccattggcacagacttctggtatgaatatcgaagtccagttcaagaaaattccagtgatttgaataaaagcatctgggatgaattcattagtgatgaggcagatgaaaagacttataatgatgcactttttcgatacaatggcacagtgggattgtggagacggtgtatcaccatacccaaaaacatgcattggt

SEQ ID NO: 94 - DNA, 499 bp, Homo sapiens
  source 1..499: mol_type = other DNA
tatgttgcactgaggatttagggagagagcaagatttctgttgaggaggttcagaagtataaggaatcgggagagtagataggagtgaagcatttggcagcgtaaagaagcttggcttagctttaatggattagggagagattgctatctagcattattacatgttattgttctctttgctattttatacacctagaacaacctttccctcggggttaacaaacatcttcaactctgttttctgtatggctcctgactcttacctttgttttaggaggcttccctcttcagaggaaactgggagaagccaatttccactgcttctttttcctgtgcctttttaacactcaaacccagaacacttaatcctctgcagctcgtgcaaaaattcagtctgtaatttaaaatgtgtgcacggtacactgctgaccatgggcatgtctattgtttgtatctgtaatgtgtatgtccatttcagtgttgtctgttttagtatgca

SEQ ID NO: 95 - DNA, 499 bp, Homo sapiens
  source 1..499: mol_type = other DNA
tggaggcagacacctctgttccacctgcttcctttgtagattgtgtatgtgtgtgtgtttgtgtggaatgcatagggctgctccatcttctttacttacagtggtcactctgcctgttatcctttggccttttcctgctctttgcttctacttctccaagcatggacaagattggtgaagctgctatcctacctggcagtttacatcttcaatctcattgtacctacttcgcagcttacacagatcattcacaatttcttgtaactgagagttgctctcttgtttttctactctgctactattctttaaagattgaacaaacatatttgaacctatatatttctctggcatcacgtaggaatgtaaataaatgttttcttttttgcattttctctttcttttctatatttgacattgaatatacattttatttataatcaggaaaaagtgtatgtgtgttacaatctttaaatataaatgttcttttatgattccatag

SEQ ID NO: 96 - DNA, 499 bp, Homo sapiens
  source 1..499: mol_type = other DNA
tgagaatctctgagaatcattgtctgtgtctggaaatactatttgcaagaatgtttggaatatagccgtagtgcccagtttttcaggattttaaccacagaaagggtcatgagaagatagcctttcttgtctactatagctgtgtttatgattatttggagagttcatggggctacactgagttctttggctggagctatcttttctctgagggatcctgctgtcaacaggagaaatttgaggacaatggtgagggcaacaagttctccataagcagtgatatgattcagacctggctttgccactagcaatcatgcgaccctagaagggtcctatccactctccactggagtttcattgtctggacaataagtgtgaaatagatcatttctagggtcacttacaacttcaactttttggatctaaggacagagccagattggactagccttgagccagttatgattgtccttctcattttgcttggggagatagctct

SEQ ID NO: 97 - DNA, 499 bp, Homo sapiens
  source 1..499: mol_type = other DNA
tgggagcccacggggtccccaggagccgatctgaggaagtcattgtgcagcagagggttcccctcttctgcatatcctgccagagtggggaacagtgaaagtgggacctgggacacctgggtttcctgttgagtcatgttcctggaatcaccttggatgttctcagaaggcatgggaggagagcccagtgcccctctggccaggatggagttggctgttggtctcagcagcgaatgcgtaaaagaacccaggctctgtcacccactgtgttcttggtttttcctcctggggaagcagttatgctttctgtctaaattaggctattttgggccctggttagggtaagctctttgctgtctcagacagcaggtgctaagtacccacctatgtcttcctcttccactgccctcatccccttctgccatcagagcagcctggggtccctgagatgggaggataggggaatccaccctgatggaggtgctcccctgtgtttcag

SEQ ID NO: 98 - DNA, 499 bp, Homo sapiens
  source 1..499: mol_type = other DNA
tatagctcacatgtgcccggtttccatgaactgtggtttggggacctcaggtgaggcttggggtcatacagtgtgcccaacacaggggacaggtgctgcaggggccataggctgttttctagtcctgttccctcggtctcttctcatgtccagaagtcgccctgatttctctttccttcacagcacccccgacccccaccctacataacccacaatccaccaaatcctgttgtcccaactcctgagcctacccacctccctcacttctgcctctgacttgaggcactaccatcatctgaactggcctcctggcacccatgtagactgtcttccagttgaaggcataaatcagatcagccccgtccttaacaactgcttgaggctttctgctgtcatcagaatagaatccagggtcctcccctccggcccgcacccgccatctctgcagctacctcctcctcgctcccttccctcacctgcacctgcacctgcccttctc

SEQ ID NO: 99 - DNA, 499 bp, Homo sapiens
  source 1..499: mol_type = other DNA
aatgggataaacctggttttctgagtggaggcagctattgataattttacttttcttatagctgaagatgaaggagatttgaggttctctgagaattaaaattcggctggagttagcctagggtgagaccctcagagctgtctgttcatgccattgcctcaagcctgtggacgttttttcaccctggggcaagaagaggctccagtttgcccaactgctgtgtgtgttccaggccagtgtccagtgaggctgacttggcagctgccctttccacagccagccagccagcccctgagtgtgttttaaaagataagcgacaaaaagccaaccccttttagaggggctggaacaggctagtagttgctaggcaagttaaagtaattcagcgtccttgccaaacgtctgccaggcaaatagggaactttcagagaaggggagtgagatggtggtgtgtgttggttgccataggaatgtttccctgattggaacaagaccacag

SEQ ID NO: 100 - DNA, 499 bp, Homo sapiens
  source 1..499: mol_type = other DNA
taggtattttgtatttatgtaaatattatgtcagattatgtctttattttagctcttaaggtagtaattaaatatctgttcatgaattatagtttttatcgagttctgatttatagggggaaaaggcacagttgaccaaattgtatgaaaccttggaccttgaagagaccctctgatgtgggctttactgccgcattaacaagcaccctgtgcatctggtggcagcttccagaatgacagctgagggtctgagtggaaataagtggcttttagcaaatgttgaacctcgaatgtgctatttaacctccctgattaattgattatccagctccgaaaataagaggtgatatagctatccccttatctcagcatggatgctgttctcatttgaatacaatttggggggtaggtgggggtagtatcagatcctagggtacatgctatgataatgacaggcttaattatcagtcagtcaatattgtttagaacaaatgttttc

SEQ ID NO: 101 - DNA, 499 bp, Homo sapiens
  source 1..499: mol_type = other DNA
gccaggtgaggggctgtggggaggggagtaggggacctgggtgggagcagtggaaagctttggccagtttaggtctaggatggaaactggaggccccatacctggccttaatcctctgtgttctttcatgcggctctgcgccttgccctgttgattactcacggtggctggtcccttggatagtatgttgtcaatgagggtggcattactgggatcctagtgcctctgagaattgggggcagtgctttgggccctgctgccagctcttgctttcctatttgctccttttaccggaggctgctattgctctattgctctctctgctttctctttggactgtggtgaggtaaacactccagctggtccttgcctttctctgttccccagcttcttccttactaagtgggaggattcttgtcctgtcttattgccttcattccctccccccgccatcaccttgggggtaattctcttctttcctatccccatgtgctctcag

SEQ ID NO: 102 - DNA, 499 bp, Homo sapiens
  source 1..499: mol_type = other DNA
taatatccctttcccaaccctggacagtcttctggtctcatccttaccctccaccctagtcaggggctagacacagggaatggggatcttcagggtagtgacttgtttggtgtccaggttctcagttggaggccgagtgatgcatgttaggggctacatcttgaagaacgcgcatctggggactgggatgctgttgcatgttatggttagctcctcattacatgctggtggagcagtgcatgctggggatatgttgcccgaaagggccttacttaggcatgatgcatctcggtgttaggaagcctctgcagaggggtagtttggtagaggtgacgtgtgtatgcatggcagtgagagagtaaatctctgcaggatgcaaagtgtacatctgaatttggaggtttggagggcatgtgtgtgtacaagaagccgcttagccatttggtcaagtggtcttggaaggattggtcgccatgttctgaagcccacagtacttctt

SEQ ID NO: 103 - DNA, 499 bp, Homo sapiens
  source 1..499: mol_type = other DNA
ctatgtctagcagcagcctctgtaggtgtctggcaggacgggaacaccaggcctcatctggcctcccaaaagcttgggctcctggaggtgctactgtggggatctgtcttaggctgagtgtcagccggcggcaggtgaccgcctggcccttgcagtccctccaggaccaccacgaagcacgacgcacatcctggagctcgccataccggctcccaggcctcaccctaggctctagggtgttgggcgccgcctcttcagggacctctggcccaggctccagttccctgcggatctgatgtggaggaaacagctgtttcctgggctttgcatccggcctagaagatcctgggtggagggacccatcaccctccgaggctcacacccactgcccacctctcctcctggcgctcgagtcccttgcctcattccttgggctgtctctggcacccatcgtttcggttgcctcctcatcctgaacgtttgcttttcttttctcaag

SEQ ID NO: 104 - DNA, 499 bp, Homo sapiens
  source 1..499: mol_type = other DNA
tatgtctccgccaccctggtgtcctcacctcggaggctgatggactcatggtccaagccagcggggctacaagctgctgtctttgcaccttggtccttggccaagcctccccttgccacgggggcatgggatgacctgtgaacgagacagggtgcaggagtcacagcatagctggtttgcgaggcagctgagggcggcaggaggcagagtgagcagggaggccatctgagccgtccgctgttgtgtgacagacgactcggctatgatcaggcatctgtgagatttgagacagcgctggtgcaccggggcctggggcacctcggaaaggtgtctgggctgtccgagcgcttgggtcccaagggttggggacccagggcatgcagtatccaaggcgggaggcccactgaaaggtggtcacggctgtgcaaggccaccctggtgtcctcctggccacgggactctgagcgccccccaccttctgtgctgggcaaggcccaca

SEQ ID NO: 105 - DNA, 499 bp, Homo sapiens
  source 1..499: mol_type = other DNA
gccggccggggtgtactccgcgcgggaccctgggcctccgcaggccccggcggggtcgccccgaggcgggcctggcgagtccaatcgccctgcccgcaggggacccgcccctcatgggtcccgccaatcgcagggtacgttgctcggcagtgctgcgcggcttggcctatgggacggcgcgttgttgggctgcagcgccgcaggccgcacccaggtcgggcggtgggggcgagcggaggggctgaggggcggagaggcctggcgggccgctgctgcgggccaggggacgggggcggagccggagccggagccgacgggcggtggccgcactgggaccccggaatcccgcgcgctgcccacgattcgcttctgaggtgaggctagctagcgggggcggcgggggcccggttcgggctgaggcggcggcgggggcgcggggaactgggccgcggttgcggcgggcgggggccgcggggcctgcggcggcccgggcagcctc

SEQ ID NO: 106 - DNA, 499 bp, Homo sapiens
  source 1..499: mol_type = other DNA
taagttaaagaaagattttttgtgtgaaaaattgactgagatcttaatggggataggaaatagaatgctgataggtcgactgtgtctatgagtagaggcgcctagtgaaaacaagcttggagtggatgagtaggagttcaacaggcaccagagagaggagggcatttcaggcagagggtgtgaattgtatgaaagtgagtttgtaaactttggagccttgaatggacaaaggcccgcgatgataccttttttttttgagacggagtctcgctctgtcgccaggctggagtacagtggcgcgatctccagtcactgcaatctccgcctcccaggttcaagcaattctcctacctcagcctcccgagtagctgggactacaggcgcgcgccaccacgcccagctaatttttgtatttttagtagagacggggtttcaccatgttggccaggatggtctcagtctcttgacctcgtgatccgtccgcctaggcctccaaaag

SEQ ID NO: 107 - DNA, 499 bp, Homo sapiens
  source 1..499: mol_type = other DNA
cctcccgagtagctgggattacaagtacacaccaccacacctactaatttttatattttttgtagagatggggtttcaccatgttgttcaggctggtcttgaactcttgtgagctcaagtgatctgcctgcctcagcctcccaaagtgctagtattgcaggtgtgagccaccgtgcctagccagatctcagtgtctttataactacaactggctgccactttctagcattgaccttggttgagatagttagcctctctaagcctcaattttctcctcagtaaaaatcctgtagtaatagcatcctcatagagttgttctgacagttaacagtatatttaccttagtgggcttagaatagggcttaatgtaagacatacattaaatattagctataatttctaaaaatcaagtcagttcaagcacatttcacttgaattgcaagataatttttaaaatacagcttacactcattttcaaaaatttcttgactttctttag

SEQ ID NO: 108 - DNA, 499 bp, Homo sapiens
  source 1..499: mol_type = other DNA
tatgttttactccatttttggaacccagtgtagtttcatgtgttctttcagactgaatttctcttgatatattgtgtgactttatggcacttggcatatcattgtttataaagccacaataacaaagtattctcatgagggcacttaaccccttatcatccccagagcaacttcctcaggcaactgactagcatcccctagtatcatcctttctgggcaaagagtacgtctgaaaaaggatcagtgcctgaatatgaccttacttgtctaaaaagaatctgaacatgttggaataacttctattaactagtttatggcatcaagaaagacgacccaccttgtaagattcattccttttgtattaatggagaaagacttgtaactcttgtctcaagccaagatacgacctacaggcttacaaaggcaaaggaatagtgaaggcaatctacagtcattggagggcagataaaatctcaggcgtctcctcctctcgcctcca

SEQ ID NO: 109 - DNA, 499 bp, Homo sapiens
  source 1..499: mol_type = other DNA
attcctaggctgctggctctcagacccgcagtgaggtctgacgtcatttcctgccgtaagtatacagtgcctccgggtcgcggtcattttgagcccctgtctggatgacttcttgcggctgttctacccctccccctccccgcggtaccttgcacttttctccctccctgccccctctcgagtccaccctccgggccttctgcccctgatcgcttggttttccttgcagtcgcctgctgctgtcgtcgggaggtgggtgaggtgacgcaaacagccccgttgttgccctccgcgtatcccctcaccacctttgcggccatccacgactttcgcaccttccgccattttcctgcctgtgagggtggacagatcgcgctcgggtctcggcctcctgagtgccggtgactgcgggaggcgacggagtgcttctgggggtgtgagctggggaagttcgtggtcacggatgcgtgtggggttgctgctcagtctgtaacggcag

SEQ ID NO: 110 - DNA, 499 bp, Homo sapiens
  source 1..499: mol_type = other DNA
taatcagcggttgtaggccgcttaggctttaatccagcgttgttttgtgtaaagaacttaaaatggtattgtcttaagcgccgtgtcagccctgacagtcttcctggtgtttctaggaaggatgccgttatgggaaataagagggtttcattttttctcatacggttgtagggtaaaggtagtttattcagcaggctccatccatccatgaattcagctgaccttttttatttcttttctctaattaaggggttggcatgtagtaggccttcatggcttattgactgaatgaattatggaagggctcagttgctgtcctcattgtgtatgccatttcctgtttccatgcaaattgtttttaaaatgagaataatcatgatcccacgtaaacgttctgtaaaatacggttacttgatctgttggtctgagtcccaatatatgagtttttaaaaaaagaaccaaataaaaaatgtatattcttggaattttatgcattttt

SEQ ID NO: 111 - DNA, 499 bp, Homo sapiens
  source 1..499: mol_type = other DNA
acgtatttgctgcgatattacttatcttctcagtcaaatccattggtttacaagtattgattgactgcctgctatgaatctaggccagtaccaagcacagtatagtttttaataaatataagtttataaaaccaacccagatattttaaatataataatatctaggcatgtatgatgagttatcgcatgtaagataagttatatgaagttgtgtgactttttttccattagtccacatactgatctaaaagcagaaaattccagcttttgctttgtttagtggattgctaagtttaaaattcacattggatattagtcagaactgtttgtatgaccataatattcacaatattgtctgagatattagctgagaagcccattgtgaaaagaaagtctatgtgtgctgtttgtatctattgtgattgtcagctgatgttagatcacattttctaaccaaacataagaccaaccaaactctttattataattatttgaccag

SEQ ID NO: 112 - DNA, 499 bp, Homo sapiens
  source 1..499: mol_type = other DNA
tattctgtgttcgtttgtgtgtggaggggtgtgtgtgtctgtttttcaactgatttgaaaatacaggtgttgaatcctaataataaaccagaaaaattaacatctccagagaagatagaggtcatactatttgaggcaagaattagcgtctttttaataaacgaaaatatggcaaagatgcattttagaaggcacgtggagctataacaatttaagaaatacgtgaagagctcaaggctcagccttctagaatcccagaaacttaaagctagtaaaaaattggggaagtctctaaggatatatgcctgaaaatacacactggttatctgtgagtgttaggattactgggtggtttttagtctattcattttgcttacctttattttcttcatattagtttttaaaaattataaatgtaacttatacatccattctctctgagcctgtattacatgtgtcatgagaatagatagatagatatgaaaaagtgaagagaaaa

SEQ ID NO: 113 - DNA, 499 bp, Homo sapiens
  source 1..499: mol_type = other DNA
gcagggagatgatctcctcctcctttttccaaggctgcacttcttggaagtgaagccggtttgggttttgtttcccttccccctcctccctcctcttcctccacccctttcccctccccctccctcccccaatcccccctccccccccaatctgtctttctagcatgttgccctttttcaaccacatttgtgtttcaggtgtagagaggagagagagtgaacagggagcggggcttttgtctgtaagtatatgccattcctatccccggctgggagcgctggtttctcttttgtgtcgattccttgccgttgctcttagctggacccttcaaccctgcagagttcatgcttcttccctctaaattttaaagagctgaagcgtgtaccttggagaaattctggcattttggttgtgctgcattcaggctggaatttaacttgggttttttctaaaatgcacaagttcggagggagaaatgaattcttttgggaaggggtg

SEQ ID NO: 114 - DNA, 499 bp, Homo sapiens
  source 1..499: mol_type = other DNA
acggccctggcgggccgccgggctgtgcagcaccctggccgccttcacgcttggcgcgcccccaaaccgcctcctccacctccttatttgtctgaaaagcaaccgcacgtcgaggcggagaggctggccgggggcggggaggaaggccggggatttgcgcgcgccgtgctcccggggcggggccggggcgcagagctgcgggtccgctttgtctccccggggcgccgcgcggtgcagtggggacggcgcggcgagcggggcgcccggggcgcgggtgcggggtgtcggggcgcgcgcgcctgttggccgctcgccgacggggcccagagccgccgattcctgccgagtaagcagtctggctcctaggcggctgcacagtggcagcaaggctggggcgctggctccgcgccagctccatcagaattagctcattgttcactagcaccctagcgggagagagagggaaagggagagagagagactcttagagaaagagaga

SEQ ID NO: 115 - DNA, 499 bp, Homo sapiens
  source 1..499: mol_type = other DNA
caaatctttaccatccctaagggggactttccttcccaggggctatctctggaagcccctcaaggataggggccgcatgctgtttctctaggtcagcaactaaacccagaaaacgtttattgagtgaatgatgaaacgacaggtgaatagatgaacgcaaggtgtcgagttaactattcttctacacaagtcctagcagctcccattgcttccagccgcagaaatggcccctggaaggcaagtcttccagcgagtggagtcactcttaactacatttcccaggattccaagggagccgcgcgctctgcgctcatcttcctaccagaaatcggcaagtcactgaccctcgtcccgcccccgccattccccgcctcctcctgtcccgcagtcggcgtccagcggctctgcttgttcgtgtgtgtgtcgttgcaggccttattcatgggctcaccgctgaggttcgacgggcgggtggtactggtcaccggcgcgggggcag

SEQ ID NO: 116 - DNA, 499 bp, Homo sapiens
  source 1..499: mol_type = other DNA
tacagcccgcttctccccagcaccccggtgtgggcttcccaaggtcctgcctgagaggagaggccaggctgggctgctgattgcaaaactgggtgaaagttctccctgacccttatctgtgggcatcgattgttactcttcctgcaattaactctcttagatctttgcctagtcttttaaaggactgaaaagccgcgaggggcgggggctggaattcgccccctgaagcgcagagatgtcagctcctgaaaagtcattcggtcgttcagtgtttgtttccctctgtcgtaagattttaagttcgtgagaggaccttctttaaagagggcgtctgataagagcccttccccgttggagtttgtatgcttagcaagtcacaatctgttctcgaaatccactggagtcttggcagaggttgtaagctcaaatgcgcacaggggtcaggcgtatgatggagaaagaaaatgggagtaggatgggcacatctgaggaactggag

SEQ ID NO: 117 - DNA, 499 bp, Homo sapiens
  source 1..499: mol_type = other DNA
tggccggggacactctgagtttcgcgtgtggcttttagggacgtttatatttgaatttccctgaaccgccgagtgtgggcggtggcgcagatccgtcccggaaacctccgggctccttcccgcctttctcaggcccggcccctccaaggggtccccgcggggcggcgggagggccctgggcccagagccgcgcgggtgggcagtcccaggcgtccttccttacagccctgagcctggtccgggaaccgcccagccgggagggccgagctgacggttgcccaagggccagattttaaatttacaggcccggcccccgaaccgccgaagcgcgctgcctgctccccattggcccatggtagtcacgtggaggcgccggggcgtgccggccatgttggggagtgcggcgccgcggcccgcgccacctccgccccccgcggcttgcctccagcccgcccctcccggccctcctccccccgcccgccgctccgtgcagcctgag

SEQ ID NO: 118 - DNA, 499 bp, Homo sapiens
  source 1..499: mol_type = other DNA
tgagtgggtgtgtgtgttttcttacaaagggtatttcgcgatcgatcgattgattcgtagttcccccccgcgcgcctttgccctttgtgctgtaatcgagctcccgccatcccaggtgcttctccgttcctctaaacgccagcgtctggacgtgagcgcaggtcgccggtttgtgccttcggtccccgcttcgccccctgccgtcccctccttatcacggtcccgctcgcggcctcgccgccccgctgtctccgccgcccgccatggcgactgcgacccccgtgccgccgcggatgggcagccgcgctggcggccccaccacgccgctgagccccacgcgcctgtcgcggctccaggagaaggaggagctgcgcgagctcaatgaccggctggcggtgtacatcgacaaggtgcgcagcctggagacggagaacagcgcgctgcagctgcaggtgacggagcgcgaggaggtgcgcggccgtgagctcaccggcctcaa

SEQ ID NO: 119 - DNA, 499 bp, Homo sapiens
  source 1..499: mol_type = other DNA
gtacgcaaagagaaccagtggtgtgaagagaagtgaaatgttgtgcctgacactgtaacactgtaaggattgttccaaatactagttgcactgctctgtttataattgttaatattagacaaacagtagacaaatgcagcagcaagtcaattgtattagcagaatattgtcctcattgcatgtgtagtttgagcacagatcccaaaccttacggccaagtttcttctagtatgatggaaagtttcttttttctttgctctgaataaaactgaactgtgggttctctataagtggcattttgggctttccctcttttttgtaaagcaatgtctgcctagtttattgtccagttaactttagtgaccttttaaaagttggcattgtaaataaaacaacttgcaaaaaagttttctggaatagaattaacaaaatattatctttattcatgagttggaaactggaaaaaggcttcttgaagtaaatgttctgagtggagcta

SEQ ID NO: 120 - DNA, 499 bp, Homo sapiens
  source 1..499: mol_type = other DNA
tatagtgctataactgcttacgtttgaactctttaagtgtggacaaatatttttgccaagacctgatgtggtatttgtgtgcatgtgtacacacatacacaacagtagtggccgttatttcacatttgagctagtatagtttggttaaggaagcagaaggattcaacattatagaggtataacaaagaaggtcacataaaagtctttcacagaagaacttaggagtgatttattcttctccctttaatttcttaaaattagcattttaagctttattagatacggagtgtcaatcattaactttggatttagtttaaaacatcaagtatactttaaggaaaacaactgtctctttacaggctgcaaactacttagacatcaaaggtttgcttgatgttacatgcaagactgttgccaatatgatcaaggggaaaactcctgaggagattcgcaagaccttcaatatcaaaaatgactttactgaagaggaggaagccca

SEQ ID NO: 121 - DNA, 499 bp, Homo sapiens
  source 1..499: mol_type = other DNA
cctttcagattagaaaggagcagtcccatgagccccatggggaccccagtgcactaagagtgaggggctgtgcagggtcacacatggggccggtgctgctggacacagggcacctcccaactccctgccctgtactctgcgcttgcccctgtcccaacaggttccccttctactttgaactgaagatcgccttcgtgatatggctgctgtccccttacaccaagggctccagcgtgctctaccgcaagttcgtgcacccaacgctgtccaacaaggagaaggtttgcccccactctcagctcacctcccagcctgcccccagccaaggcagtccagagcctgcagcctcatacagactggccctccctgtggggcccagagcccaaagtgacttggcagggctgccgtggcctcccggagcaggcaggggcctctgtccaggggtgaacaagggtagggcaggacctctcctcttctcccttcccctccaatcccatag

SEQ ID NO: 122 - DNA, 499 bp, Homo sapiens
  source 1..499: mol_type = other DNA
tgagatgggggcaggctcagactcccagggcccctaccttgtacaaagggccctggccaggcccctttgcatccaccctgtactcggggctgtagagactctgggctcatgcagctggaggctccagtccaggctctactgctatctggccgagtcactttgattgtccggccatttccccatctgtccccagaggcaaagtgtggccctgccccagccctcagctctgtctgtgtgggactgggtgaggacagtgtggggagggcaccgagcctggggctgctgccagcaccatggtgacctctatctccaccccgccccttccccccggctctcccggtgcgtggtggtgaccctagggccagggggtgctgtcagagaagctccgcagcttcagcatgcaggacctgaccctgatccgggacgaggacgcactgcccctgcagaggcctgacggccgcctccgacccagccctggcagcctcctggacaccatcga

SEQ ID NO: 123 - DNA, 499 bp, Homo sapiens
  source 1..499: mol_type = other DNA
ccctttgtggccccaatatctggcgctttccaccattccttggcaaacagaacaaccagagagcataaaagtcgagtctaagccagggactctcgcgaatcccttctaaggcataccctatttaaactttgtattatgctattcaggaggttgacaaacagccttttcgggaatgggactcgaactcgtaagccacgtctgttcctccatttcccgcctcagctggatgacggagagggatctccgggattaaagaacaacgaccgcaggcgagtgcacgagcgaggtgcgcgcgctgagtagggggaggggcctggcgcgcgccgaaccagatcgagggggtgggggcgagctctctcgcgagagtgggtttgttcttgggctgcagccgctgccgccgcttctcgccagcgccgttgctgcgggggattgtgggagtctccgcgtcccgctcgctgggagagaggtacctctccttttccctctccctttccctaag

SEQ ID NO: 124 - DNA, 499 bp, Homo sapiens
  source 1..499: mol_type = other DNA
tgagcggtccgggagggaaacacgcggccggccaagggcccagggtgcggcgggagattttgggtgaagaggtgcgctgaccggccgagcttcctgcgcgtcctgggctcgttgtgggcgggggcgggacgactagcccgttacacgcgggccgcggcgctgagggggagggaggagctcgctcgaggcctgagggacagactgtacactgggggcttgccgtttgaggaggatggttaagatatctaagtccttgggtagcgccagtgccaaataacccgttcgcctttttttctctgaaaatgttcccccaaaatggaggatttcgcagactctgaagagcctgcttgtttgagcagcgtttctttcttttcccggtgtctcggccttcacgccgctccttgcccatcgcctcagagcgccccctaagactcccggcccacacgcgcgcgcgcgcgcggcgttagctggacatcagaaacaattcctccccgccccc

SEQ ID NO: 125 - DNA, 499 bp, Homo sapiens
  source 1..499: mol_type = other DNA
gtaacaggtcctcaccctccacagtcctggccatgggactagctctgcctgggtctccacagaggccaggagactcgctcactaattctttccttcattgattcaataagcatttattgaacacctactgcatactggacagcaggttgggcttggggagtgagcggtgaatgactgagcccttgctctagtggagaggacagacaagttcctggggcgttatggggcagtggtgagtgccatgcctgggaaagcctcaagatggtggcagaatgcagcaggacaatggtattctgggtctggagccaggggcgtttaagctgagaccttggaggataagcaggtattagccaagttagagtcagaatgggaaagtgtggccgggcgcagtgactcatgcctgtaatcccaacactttgggaggctgaggtgggcagatcacctgaggtcagaagttcaagaccagcctggccaatgaggtgaaaccctgtctctacca

SEQ ID NO: 126 - DNA, 499 bp, Homo sapiens
  source 1..499: mol_type = other DNA
tcccatcgccggaatgggacactgtcaccccggaagccaaggatctgatcaataagatgctgaccattaacccatccaaacgcatcacagctgccgaagcccttaagcacccctggatctcggtgagccttcctcagcaggacttctcccaggagcccctccagacctcatgatccaggcccccacagagttctggcccttcccctggcccatggggccaagagggcttaatccaagagactgcccctgctgtggttctcaggggtaatgtggaaacgaggagtgagtgttctgggttggcatacaactgatggtgctactggcattgaatgtctggtgccaggatgctaaacaccctgaagcatctcctagagcaatgaatcgttcttcccaagatgtcaaccacacctccattaagatgccctgctgaagggtacccttgggtgggcctgtcttccagcctgccttccactcacagccctctcccctacttcctcca

SEQ ID NO: 127 - DNA, 499 bp, Homo sapiens
  source 1..499: mol_type = other DNA
aaaccagttttcagagaattagagttggatatcaactggacagcacccacaacagattagacttggattcttcctttgaggacttgagaggccgtcatgagaagagtgcttctcggctcctagggatggtgagacaggccctccaacagggctgcagatgggggactgtctgaggcactgacggccactgtggctgctttcccacaaaggaagccctgtggcagggatggtgggtcacacgtttctgtggctgctctacccgcatcagtgccaggcatgtgatgggggagatcccagggaagctccagaggcagcgaagacgaacgcggttgctgggaggttggagtgtctcagaggtggcccccggcagtcgcggcggctttcccaccgtatacaatacctcttgcttttctctctctctctctctttctctctctccctcttccctgtctctcctgccctcccattccctcttccttctctcctatctatgtcttag

SEQ ID NO: 128 - DNA, 499 bp, Homo sapiens
  source 1..499: mol_type = other DNA
tatcacaccgcctggctgggttggtttgggtacccttctcgaggaggcagcaggaatggactagcctggctcctcaaggccccttccagccctaagattcacagacaaatgatgtggagagatctagattagcaaagagaaccaccccaccgcacttgcatcctttgcacttaaggcaccctgtaagcgggagttaattgtctagtagcctcctgtgtaagtaccaatgttaacccgccttccaccctgaacttcagcaggctgtgcagtgcagctgatgccaccaagggggcgccatcgctcagccatggggtcaaaacgctgagggtcaggaacaggtgtgggagggggttcgttctgatcttatcccatttctcagttcctcagaatgttagtgctgaaagggactggtgtgagaaggcatctggtccaaccccctcatgttacatgagacaactgaggcccagagtgggggctttgttgcctaaggtcacacagc

SEQ ID NO: 129 - DNA, 499 bp, Homo sapiens
  source 1..499: mol_type = other DNA
gccaattgggccgcgagttgtggtttaaaccaggagtgcgccgcgtccgttcaccgcggcctcagatgaatgcggctgttaagacctgcgtgagtgaatgggagggtcgcgggtggttagttgagccggctccggcggggaaggaggcgggctgcggctgcggctggggctgaagctggggctggggttgggggactgcccggggcttagatggctccgagcccgtttgagcgtggtctcggactgctaactggaccaacggcaactgtctgatgagtgccagccccaaaccgcgcgctgctcgggaccttagagcctctgactcaggctggaagatttgagagctggattaagtacttgttggctcacgcccgtgactgttccgctgtttagctcttgttttttgtgtggacactcctaggatagaaagtttggtatgttgctatacctttgcttctcccaccttccccaatatctaatatgtatttctcattcttag

SEQ ID NO: 130 - DNA, 499 bp, Homo sapiens
  source 1..499: mol_type = other DNA
taagtatacaaggctgcagtcggatacactggtattgtggacgtggcctggagctggacgagacatttagtgtactttttgggcaattggagtcgtttgttattggtcctttttcatttttaatatcttaatgagatgatttaaggaagttactgaatctctgctattaggcctatcatagccatgccactaccaaaagtggggggtgggtttgggggtgagaggtcaagtttatatacacagtatttaagttgtacaggtattttgctgctggaatattcttatggtaagactttttcttcagcaatcaaagccttagatgggagatctcaagtttcaacaccacgttttggcaaaacgttcgatgccccaccagccttacctaaagctactagaaaggctttgggaactgtcaacagagctacagaaaagtctgtaaagaccaagggacccctcaaacaaaaacagccaagcttttctgccaaaaaggtaagtgttg

SEQ ID NO: 131 - DNA, 499 bp, Homo sapiens
  source 1..499: mol_type = other DNA
gccgcgtaccaggacagcgagaggaaggcgcacaggcagaagagcagcagcgtcaggaaggtgccattgcggagcctcatctcctcgggtgcgcggcgggcgcccgcggggccgaggctgcatggcccgggggaccggggccggggcgcaggggtcggaaggcggcggcggcggcggcaggggccccggccccgggtcggggaggggcggggggcccggggccgggcggggaccgggccagggagcgcgccggccgcccctcagggcgcaagctttgtgccctgtactcagggaagaggaacaggctcagaagggcagaggcaggtatcaggctcactgcagatatcaggggcgcgggacactggcggcctcgcctccgcggcagggccgggccgggccgggctgggctgggctgggcggcgagagccgcggcccggcctggatctggggcctggatctggggccgccgcggagtcgacggcgcagggcggggcggccc

SEQ ID NO: 132 - DNA, 499 bp, Homo sapiens
  source 1..499: mol_type = other DNA
taaggctggagtgggagtgcaggtcgaccgcagccggggcggggggcgggcggcgggggcggcgctccgggaccccggtacccttctcagcaacatctcctccgcgcgcggaccccgaccccattcgcacgttctcggggctctttcccgggcgtgaggggctctgggtggcgcgggggactgggcggttgaagccgggagcgaccgctgccttcgctgccgcccagggcgcttccccgctcaggagcttcctctgggcctctggacggaggcgcgcaggggcccgggaggcgggaacgatgggcctttctaggcggtatcagggccgatgctcgtggatgcagagcagtgaccagcccagaaccgtaccggcttcccggggcaggggcggcccgagagcgccgctaacgggagcaacgggccctgcccccggtggtgtaggggccacctcgccccgcccagcccagcccgatattgatgggggcccacgccttcattg

SEQ ID NO: 133 - DNA, 499 bp, Homo sapiens
  source 1..499: mol_type = other DNA
gtgagtgcctggtgtggctgagagcatgagggattcattttacgctgggcagtggaggctgaagaggtgtgattgccagagggaaagcatgaagaacatccgcggtgtgccaacttagctttaatatagtgtaaaattgtttgcctttcagctgctaagagcttggtgtcctggccttccttatttataattatattcatgaacaaatattttaacgtttggccattttggtgataatctgaaatagtcttatctgagcattgactcactgatctatattgaggggtttgaggtaaggtatttagtacaatcaccggtgacttaagatttctctttccctctggcaggccagagtggagccgggaataactgggccaagggccactacacagagggagccgagctggtcgactcggtcctggatgtggtgaggaaggagtcagagagctgtgactgtctccagggcttccagctgacccactctctggggggcggcacg

SEQ ID NO: 134 - DNA, 499 bp, Homo sapiens
  source 1..499: mol_type = other DNA
gaaatgttgggttgtcggaactgagtcggggacatttcattgtgagccttggcgtttctgggggcatcgttcatggctaaatgcagcctttctgtctcagttttgggaggtcatcagtgatgagcatgggattgaccccactggcagttaccatggagacagtgatttgcagctggagagaatcaatgtttactacaatgaagccactggtaatcacccttgccccacccccactcccttcagtttttccaccttctcccctttcccttgcgtgggaccccaggggtgtggccctgggagagggtggactattcagtttaggatccccgctctttccctgcagtatttcattgggcttccttatgccaacagagccctttgagaacctgatggtgggtctccctttgtttggggcaacatctgcatgatggcagcaggcgccaagcccttctctgcagaggtccttgcctgagggtctaagtcactgttgttccttgca

SEQ ID NO: 135 - DNA, 499 bp, Homo sapiens
  source 1..499: mol_type = other DNA
gtgtgtgggatgtgggcaaaggagggcagggatgcacaaaggcaggagggaaggcaggggtagagggcttggagggagaggggtctttggaagaggaggtagagagcttgtcaacccagtttgaacaccctactctttgttattgcactaatcttttctgagaataggggagagttgctcttttgctatgaggagcttagggcccaaagcacagaaagcacagatgaagaacttgtgttcagcagaggaacaagtgggggtaaccccacctccagacttgacattatcttttagatcccccttggccttattagcattgttcgattcatggtcacaaattgcaaacctaccctctgcctggaaagccaccttcccacctgtagggtaagggtgaggcatgtgtggcccagactggcctatttctagatattcaacaagcccttgcctgactgacagcagcttgccaccattgctttcctgtgtgaatcccaggaaaaag

SEQ ID NO: 136 - DNA, 499 bp, Homo sapiens
  source 1..499: mol_type = other DNA
gtatgccacagtgggcctgctggtgggcatggatgtcctcactctcgccatctggcagatcgtggaccctctgcaccggaccattgaggtaccactggagaggaggtgctatggtcaggagaatgagcagggctcagtggccatcagggccctggggctgtgtgtgtcttgagggatgaagctacttggagagagtgccttcctcgtattggaagctcttcctttccttcctagaaggagcccctcataggcctccagattcagctgaagaaaggaaggggtgggaatctgggaagggtgtgtagaacttccaggcatcagggaaagtggggaacaagcacctccaagggttcaggaaaacattcttaggcctagaatgagatttggcatcagcattgagggtctcataggaaaacagttggaagccagagactgagaagcgttgaggagaggaggggaggctggcaaccatctttcttgtgaccttgtttctgcccta

SEQ ID NO: 137 - DNA, 499 bp, Homo sapiens
  source 1..499: mol_type = other DNA
ttgaggaagacaaaagcactgaaaattcataaagggaccctgggcatggattgctggggttgtgtttagaaaccgatgagtttgtgaggcctccgggaggctcccgagggcgcggggactacgtttcccaggaggcctcgcgcggacgcccgggcggggctgtgcgaggggtggggctgcgggaggccctggagcgcggcggtgatggcggggccggtgaaggaccgcgaggccttccagaggctcaacttcctgtaccaggtgagtctgcgacaagggccccacggggacggtgctcggcgtcccagagtgactgctcccctcccgcaggccgcccattgtgtccttgcccaggaccccgagaaccaggcgctggcgaggttttactgctacactgagaggaccattgcgaagcggctcgtcttgcggcggtgagacagccacggggcgggcggcgggcgggacgcgggaggaacgcgagagggagcgcgggcgccag

SEQ ID NO: 138 - DNA, 499 bp, Homo sapiens
  source 1..499: mol_type = other DNA
gatccctcggtgaagaggactctctgtcgaggctgctcttccctcctcgtcccgggcctcacctgcacccagcgccagagacgtgagtgctccaacggaggtggaagactgcggagcattgggggcgcggaggggggcggggtggggggcgggcactggaggccaacagcgcctttctcactgtagatggatgttgggtgtgggattcgcaggagtcttccttcttcgggtttggattaagttcctaacgccacttgcacaaactagggtttgggctcggctgttttttttttttttcttccagtgtgggcaataaataataacttttaagaggcaaccccacccatgcacaataatagatgttgttcggctttgtggaggacgattcccatcaccattcatttattaagcaaatacttattttctaaaatgtgtcaggtactgtgctagattcattattctcattgaaattacggtctgatgggacagactaagaaac

SEQ ID NO: 139 - DNA, 499 bp, Homo sapiens
  source 1..499: mol_type = other DNA
ggaaaacttgtgaactaatcagaaaaagtggaaggcgggagatcttggggcgctgtccaatggcgcggaagagaacacatgagctggccaatcgggaacggcacgggggcgggctcgctcggcgcgaagttcgggcccgggaattccgaaggaggggtaggcgctgcccgcgcgcagaggccgcgcccctcctggccccggcttcttggctgtcaaacagatgcagcaacgtcggctcctgccgaggagcccaaggggtcccgggatccgccgcacaggctggcactgcttgaagaggaggctactcggagactgcgccgcgcgggtagatccgaaacggggctggggcggagtgggaaaaggccgggtatgccttgcatgatcgcggggagctccttcctgtttttatcccacctagagaagccgggaagtaggggtttaggtccaatttgttggagtacttaaggactcgtttgcactttcttttgggggatgacag

SEQ ID NO: 140 - DNA, 499 bp, Homo sapiens
  source 1..499: mol_type = other DNA
ttggaggctccccaaatattttgcgatctgaggatccagctcaagtgaggtgccataggacgtgttcctgagtttgcattgcacggagaccttcctggaatttttcatttgcaagtcggcttaaccaattttgcattgagtcctaggctgcttgcactctgaatttgggctattcaggtagtgtgctcaaagttgaaaccgcatacagcacaactcaagtttgcatcagactgggaagcgaacttaagccagcggtgcgtggcccaggagtgggaaaggaaatggatgcctgaagtggaagaggtggtgcagagggggcaccgcccatgctgccctgcttccaactgctgcgcatagggggcggcaggggcggtgatctctacaccttccacccccccgccggggctggctgcacctatcgcttgggccacagggccgacctgtgtgatgtggccctgcggccccagcaggagcctggcctcatctctgggatccacgc

SEQ ID NO: 141 - DNA, 499 bp, Homo sapiens
  source 1..499: mol_type = other DNA
gcgccgctgccctgctggcccactcgctggctgcacgttccttcctcagcaagcgatttcctcaggcacatgtgctgtgccaggcactgttttggggcctagggtccagtagggcaccagacagcagggccgggttcatgggaatgggacctggcccggtgctcacaagggccttgcactgggttagatgctctgctgctgagcaagggtcctgctctttcattctgcactgggccctacaagttatgtagccaatccttccacacaaacaaggtccctgccctcgtggaggtttcgctctggtgggaaacagcccacaagctaaataactatgtaatgtaagccactcttctgcccagcgatgcttcctttcctggacctctgcctttctagggtattgggtccttacctcggggtttgggggcagcgttccagagcagagctgggcccttggcccacctgtgactctctgtgacccccagcctgtctgcccccccag

SEQ ID NO: 142 - DNA, 499 bp, Homo sapiens
  source 1..499: mol_type = other DNA
tgggcccgaaccccctccccggccggcgcctgctcctccctcctcccttgcctgggtagaaactctgctggttgtgtgaactattcctgcacctgttggtaactgccaccctgaatagcactgggtggctcagcactgggaggccctagcctccctagcccttctctgggatcccctaaaatttggcccactctggcaacaatgggaatgactccttgtaccactagaggcccccaagaccttctccagtgacaaagtcagaacctgtattgaaccagttgttaaatattttgaatatcacctcggcccttgcgcttcctcaccctgtccgtctgaacccccatctagccttcccggaccccagggtgatgccctggggctttccctccttggggagctgggagtccatcccacccatctctaagccttgggagggagctagttccagggtggcggtgctgccagctggggaaggggaagggtgggctctgtccttaga

SEQ ID NO: 143 - DNA, 499 bp, Homo sapiens
  source 1..499: mol_type = other DNA
cctgcaacggccgggcgcagacacttgcagagtcaccctcgggccgggtctggagcctgatgcctcgggggtttagccctagccgctaggcgggtaggcaaagtgtcgggttgaaagggtctccgggaacctacttcttcctgctcgccaacttgctgtgtgaccttaggcaactcaaggcttctctgggctacttttttacgggggacggggaagaaaacaagggaacccccaagataatttcctagggcctttcctgcagagtccttaagtatttgaggagcacagtttgcatgcacagtgtatggaggagacaggcttgaggcccaagcgggcttattacaaagtgagggattggggttaggccctaaatgtagttcctccaagacaggcctctgatgttcagaaacaggtggaaaagacgaacgtttcttggcctcactggaaagggcctcgggccttcatttagttcgtggggggttggctgaggggattaaag

SEQ ID NO: 144 - DNA, 499 bp, Homo sapiens
  source 1..499: mol_type = other DNA
tcagcactcgtttagttgattaattttgatgtttagtttgaagggggacctgtggtgtaatataagattctaatcactgcctgtaattgcagagcaggccaagccactaatgacggagcaggataaatcaccaaccaccttgtttaaaagggtctccaagtctgaaacattataagatagaataattaccaaagtcctgctgtctggagggtctcttgatgcttgaaaatggaggtcctgggccctctagaaatcacaagtttgcaaaaatgtttttttcctctcattggggtaaaaactctttttcttcttttttttttttcttttaaattagacatgggagtcccaccgtattgtccaggctggtctcgaactcctgacctcaagcagtcctcctgctttggcatcccaaagtgctgggattacaggcatgagtcacctcacctggcccataaatcattttcaaatggtctagttcttattttggttagagtgaaga

SEQ ID NO: 145 - DNA, 499 bp, Homo sapiens
  source 1..499: mol_type = other DNA
tttggctttcatttttcctctttacagggtacctctcctccctgttgggcctcccagatacaccccaacagggtgcttctttatgtgccagaactctcacttttcccatacctaagcatttgctcatcccttgggatccttgttcctctaatctctcttctggggagtgctctctccctctcttccccctgcccccttgcttcttataacttgtggcctcctcttgggatggcagtgccctgcattctggtatgagtatgtcagtgaagcccccttactgtccacgccaggcttcctgtctcctcatggaggtctccaatccttaaatgtactcagtccttccaaagggaaggagggaaggagaaggcttgcgggttcagggtaactcctgtcacttttgtcttcttccagtgaccagaataagtataaggaagctgcccacctgctgaatgatgcccttagcatccgggagagcaccttgggacctgaccatcctgct

SEQ ID NO: 146 - DNA, 499 bp, Homo sapiens
  source 1..499: mol_type = other DNA
agtaatttgtaaggacaatatatacaatgtaatataataaggtaaaaatacaaaacaacagtagttgtattgagtacaactttgttaaaagaaatagcaaagtggcctgggcacagtggctcacgagtgtaatcccagcactaatcccagcactttgggaggctgaggagggtggatcacgaggtcaggagatcgagaccatcctggctaacatggtgaaaccccatctctactaaaaaaaatacaaaaaatgccgggcgtggtggcgggcgcctgtagtcctagctactcgggaggctaaggcaggagaatggcgtgaacccgggaggcggagcttgcagtgagctgagatcgtgccattgcactccagccagggtgacagagcgagactccgtctcaaaaaaaaaaaaaaaaaatgaaaatataggtggacaggccgggcgcggtggctcacgcctgtaatcccagcactttgggaggccgaggcgggcggatcacg

SEQ ID NO: 147 - DNA, 499 bp, Homo sapiens
  source 1..499: mol_type = other DNA
agtgagctcatgcagcatccactctccttggtgcccattacagatggtcacactgaggctcgggtaagttaagccacaaggctaatgatcgactggctctggtgcccgtctttggccatgtgcctaaaactcagtcctgggcaggggattaggctgaagtggcagcatagggctgagcgggcagtggctctccctgcagaaggaggaggagaaccgtcggctggaggaaaagcggcgggccgaggaggcacagcggcagctggagcaggagcgccgggagcgtgagctgcgtgaggctgcacgccgggagcagcgctatcaggagcagggtggcgaggccagcccccagaggtgagccagaggtggaggctggcctgggggacccaccctgaggcattgctgggcacctgctccatcccatggaggcgaggaggactaaggggtgtggcatgagaagctgtgactgtgcctcagctgtgccccacccggcccttcccag

SEQ ID NO: 148 - DNA, 499 bp, Homo sapiens
  source 1..499: mol_type = other DNA
acgtgggagcagcagcaagaagtggtttcaaggaaccgaaatgagcaggtaagatgggggtgctctacttgtttggacctgtcctggccacacgcagaagtccctgatctcggattgagggcccagcccagacctgggcagaggctgccctgcagtcagctggggcaggttggaatctgggcacctcaagaggtggcagtagagaggaaagccaaaggcggaagcgtcgggcttggaccacacctggtcctgggggaggccctgggagccccttggcttctgtgttttacttccttttttaacgttactttttatttttaaatgacttctctcctgagaacatgttttgcctcctggccccacactcacctttgaggggctactgggccgacagctggaggggctgtgatctggggagaggtggtgaaggttttgcccactgcaggggtcaacatgtgcttccctccaggagtctgccgtgcacccgagggagattttc

SEQ ID NO: 149 - DNA, 499 bp, Homo sapiens
  source 1..499: mol_type = other DNA
ggtgagacatcggtatccaggcacgataaatttccaagtggacacaatgtctggtgtcaactacagctgttctccttcttttcccagtatcctttgggtgcagtgagacaccaggagagctgctgctttgggggatggacaggggcagcaggaatgcctttgtgttttcgcagtgaacctccttggcctgggcgaagctgtgtggaccaagcaagtcaggagtgtggccatgttttctgagcaggctgcccagagggcccacactctactgtccccaccatcagccaacaatgccacctttgcccgggtgccagtggcaacctacaccaactcctcacaacccttccggctaggagagcgcagctttagccggcagtatgcccacatttatgccacccgcctcatccaaatgagacccttcctggagaaccgggcccagcagcactggggtaagtgagagtttgggaaggtgcttcccccacagcatccctgaacttag

SEQ ID NO: 150 - DNA, 499 bp, Homo sapiens
  source 1..499: mol_type = other DNA
tcagctctcctggagcttatggtctagttggagcaggcagacaatacatttaaaatatacagtttgttagaaggtaaatgttgtaaacaacaataacagttgaagtactggggagagttgcagttgtaaatcagatgggcagggcacaaggtaacatttgagtaaagatgtaagaacttgaaggagatgggcaagtgagctctataagtatacgggagaggggcaagcaagagttcagaggccccttgctgtggggagggatccaaggtggaggagtgggaaccaggaggggagaggaccagtggagcagatctcataggcagttgtaaggacttggggccttattcaatgaaatgaggacactttggagagttttgaacagagcagtgactgatttatgttttggttttggtttagttctattattatttaataataggcttattatttcacagaagttttatttaataaggcagacctcttgtctggaaatgagaca

SEQ ID NO: 151 - DNA, 499 bp, Homo sapiens
  source 1..499: mol_type = other DNA
tctttaaatttgatttattttaaattgaggtgggatctcactgtgttgcccaggttggcctcaaactcctaggctcaagagatcctcctacctcagcctcccaagtagctggaactacaggcatgtgccactgtacccagcaccttagggaaatgtttatgttctgagctgaggcaggcttcacattggagtaagaattgcccagcatatctcatttctgtttatccatggaaactgtataaagatcacaagaaatggatcctttcagactcctaagtttatcataacctgagtttatctcttttttataaaagtacatttatgcacaatagtgcttttaaaataagttattccaagacttttaaaaactaattttgtcgtatgggtttattggtgctgtgttcctctttggaaaaggtttgcataacctgtgactcttttaaccctccccacagctcactggatctgcttaatgacttgcttgtgttattgcttccag

SEQ ID NO: 152 - DNA, 499 bp, Homo sapiens
  source 1..499: mol_type = other DNA
tgagaattaagctgtaaatgctaattttaatgtaattttactttttttttaccccttccctctttttttttcttctgtccttttgtgtgtgtccttccctctcatcgttggccactcatagatacgagggcaccatgtagcacagctggaccccctggggattttggatgctgatctggactcctccgtgcccgctgacattatctcatccacagacaaacttggtgagggtctgagagcagtcagctgcgttgcttgagctcctctcgctgtgccacgacctgtggtagccaggatgtccaggcaggagggaaaggctcttaagtttcctttcattctgatcacttgaaatttatcggtattgtagccttagtgtgttttgggcaagttatttttatcttactttttcagccagattgtcttaagtctcaaaatttgaaaataaaattttggacagaaaggtttgtggcacagggaaaaagcttgtccacctggggca

SEQ ID NO: 153 - DNA, 499 bp, Homo sapiens
  source 1..499: mol_type = other DNA
ggccctccaggaaccggcaagaccacaagcattctgtgcttggcccgggccctgctgggcccagcactcaaagatgccatgttggaactcaatgcttcaaatgacaggtaggtcttagagtcagacctgtaggggggcgggtgctctgcattgagaattgttacagaaacaacctttctcagcattgggttgtatgcgaagccttgccagctatgtgatttcctccaccccttcccagtgaaagagcgttgctcacttgtcaacttgccggtttattttttttgttttcatggaaattttcaaaaactgttcttctcagccaggcatggtggctcacacctgtaattccagcactttgggaggccgaggcaggtagatcacctgaggtcaggaattcgagaccatcctagccaacatggtgaaaccccgtctccactaaaaatacaaaacttagctgggcgtggtgctgggtgcctgtaatcccagctactcaggaggt

SEQ ID NO: 154 - DNA, 499 bp, Homo sapiens
  source 1..499: mol_type = other DNA
gcctgttgagtgtctccatgtctcatcccactgtccgctgaactgctttcttgtgcacagcgctgcctccctggagagccccttcccattcccccggcaaagggaagtgtttcactctagttgggaggcctggggttggttgctgtatttttttttatttatttatttatttttttttctgaaacggagtctcactctgtcacccaggctagagtgcagtggtgcaatctctgctcaccgcaacctctccctcccaggttcaagcgattcttgtacctcagcctcccgactagctgggattacaggtgcctgccatcacgcccagctaagttttgtatttttagtagagacggggtttcgccatgttggccagtctggtcttgaactcctgacctcaggtgatctgcccgccttggcctcccaaagtgctgggattataggtgtgagccactgtctccggccagctgtattgatctgtgtgtgctgtgggtggaatgca

SEQ ID NO: 155 - DNA, 499 bp, Homo sapiens
  source 1..499: mol_type = other DNA
gtaagaaagaaagattaaaattgctttataatgctacataataatccattaaactaaaaagatcatgggggaaatcatgtagattgtaatattttgtcttcccagagccatgagtttggactttctcttcaaatgacttttgatccctttttatataatggcaatctaaacattgtcaatgatcataaggcatttggaggagtaaatcaatcagttctctgaaaacattagtgagcctactttcttagactccacataggttatggatgctgaagtaacacctaaaaccaactggcaaggagagagttgcagggaaggttcatggagtttttcaaaggaagtaatgcatgaactaagtcttcatattgtgatgtgtaacattgctttccctataaggtaatggtttattcaatttagtgggcccattaaatttatattttctttacctgaccattttcccttcagtgacaagaaaaaaaaaatctgtgagagaatactc

SEQ ID NO: 156 - DNA, 499 bp, Homo sapiens
  source 1..499: mol_type = other DNA
ttaacagatttctaaaaaatactgaaaatggcaacagccttgcaaggacagtttagcctctaaaagcagttcctttgaagagaaaatactcaattagatgtatacattctgttctgtttaaaactcagttttgtatttttctcattatacttaatgtaaaatgtatcctgttaacagtgaatactttaattggtttgggaatttgtttttattgagaatatatagtgaaaataactgtgaacacagtgttcaccaggggtttttagcatttaatgtgatgattattcagatttctctacttgaattttttaatgaatgaagatttttcaaagttaattattcatataattcctgattaataattgacagatcctaatttggggccacatgtaaaatatatgaaagctcacataacgtggcaattttttactctgagagactgcagcagttcccatctccccttaacctattgccaccaacaccattgatttgttttcca

SEQ ID NO: 157 - DNA, 499 bp, Homo sapiens
  source 1..499: mol_type = other DNA
tggtacgtgcctagcagttttttagaggttacctaataaaacaagctaggttttgtatcacacaaaaaattatttatagaaaatattttcttgggctgggtgaggatgctcacgtctgtaatcctagctttttgggaggctgaggtgggaggactggttgagcccaggagtttggcaccactctgggcaacatagtgagaaaaatttttctctacagataatttaaaagttagccaagtgtggtgttgcacacctgtatgtagtctcagctactgaggacactgaggtgggaggatcgcttgggccaacgagtttgaggttacagtgagctatgactgcaccactgcactccagcctgagcaagggagagagagaccttgcctattataataaaaaaaggaagaagaaaacatttcttttcggagaggagttaattttagggtgggagtagaacagatgtgagagctgttaagtatttcattccttttctcttttctag

SEQ ID NO: 158 - DNA, 499 bp, Homo sapiens
  source 1..499: mol_type = other DNA
tgagtctccccgagagaagtctatgttttgttagtatctcatcctgacagtggtaaacagaattgcctgttgagggctattggctctagccattgtctttaacctcgctggctgttcatccaggaaacaataaaaagattgagttgaggaatcttattctaacataattgtagtatcaagacattcagttatacgttctcttgatttatacatagtctgttttcactgtcatgactgctacatattccttggtgtacaaaaagctctcatgtgagtcaaaggttgaaagtggatatacctacaaagtgtttgtttgttttagtctgattgtaaagccaattcattggtttaggctgagcagatggcaaggagagattgagaagagctcattgtggaaaagtgccttctcattggttgctattctctctaggtacttacttggaaggtatcagaatatgaaatcttgattatgtcacataagaatgttccataccttcct

SEQ ID NO: 159 - DNA, 499 bp, Homo sapiens
  source 1..499: mol_type = other DNA
gtaagtgagaggaacgtacgatttctcggagggctcttcgatcgagtttgccttcaccctgtgccacttttctgggtgccagcagatgatggtggtaggggtgagagaggctgcctggtgtctttgctgataggactgctttcaaaactgacttgctccagaggccaagggaggcatatttttggggtttcaggttaggttagttcgggtgtgcttaggtaagtgaaaggaaagaagtttttgtgatgttaagcatgtatttggaccgtgttccagctaccagctggagagcaagacagggtgggctggagagtgcatctttgctttttgtaaaacctggagctttagtaggtgtgtctctggctgggtaggtgcaaagaaagtaaggcagcctgaacaagcagctctcattttcccagcctctctctgattctctgattgccccagagcctgtcagcccatgactcttagctggcatttctaggtaagctgtgggggc

SEQ ID NO: 160 - DNA, 499 bp, Homo sapiens
  source 1..499: mol_type = other DNA
aaggcaccaaggaaaccaaaaaaggaaagagctctccctaaaggtaagtagcacttaattgggaactttgagacgtctgtcactctttgtgacaattgagaaaaagtactttgtacattttgtgctttgcaggtgagatgtgactgacaccttactgtctctgtgtttagagagggctttcgtgggtggaagaagaggctggtttgaagagagtgcttttccattctgaatatcattaaaggattgtggggggccaaaaatgtaacctaaaatgccatcaattgtccatttaaaatatcctatttggcaaagtggctttgcactcatctgaagaatagatcatgggtggagtttggaaaagaaatgttgtgtttcgtctctgctaaaaacaaaacaaggtaccatctcatggcctcttggttcaaatccgttttcttgctccgcagggagagactgcccctggagtattctgcttttaataagcttcccaatcagctct

SEQ ID NO: 161 - DNA, 499 bp, Homo sapiens
  source 1..499: mol_type = other DNA
ttagaaacctcatcacataatttcatttctttccaaacttgaaaccttctaaacttgaaaccttctaaacttgaaaccttccaaactcaccacttggcggcgttgatccatccgcccgcgcacaaagagaagatcgcggaacttcagagttaaggggagccgtttcccgcagcgctagccggcagtatttccaaggcgcaagttgcggagtttctgtttcctttttcctctggcgagctttgcgttccctgtgcgccggaagtgatcccctgcgtggctgggctgctcgggttagatcgtcaggtgagggaggaagggatagccagcgcgaaggaagtgctggagtcgtgtgttttggctgcgcgtgatcctgcgtgggtcgggaggtgtttctgtgtaggtgtctggccctttcatcagtcgtgcggaggaccgcgtgatttccttccagttctcctcggttttcaggtggtggcgccatcttcggtaaagggtgtcc

SEQ ID NO: 162 - DNA, 499 bp, Homo sapiens
  source 1..499: mol_type = other DNA
tacgttgtggtcacaaaattggagtgcataaaaattatgaatatagttaggaatttaggactggtgagttgtacttttgccataagaggtaatgtttttttcttattttgtttttttccttcaggaaaagcctaaagattagactgtaagaaaagaaaatagaagccatgtttcgaagacctgtattacaggtagtcacttgtctgtattaatactgagatgtattactatcagccacagtgatcagaagacttctttaggcttttaactacaggggcaaaagacctttgagctcacccacccacctctatactcatttgatatggaggattggggacgattttgccagtgtaaattatgttcactaaaacaaaaaaaaagttcaggtttattcacacgtaataggaatcattaatttttaaaatgtgtgtgtgttgcttgaatttaaccagtgagaggacattaaaggtctttagtgacctaaagactgtaggaatca

SEQ ID NO: 163 - DNA, 499 bp, Homo sapiens
  source 1..499: mol_type = other DNA
atttccctaaaatatcagtttcataaattgcaaacatatgaccatagtccccactgagaccagagtaatatgttaattaatgttggcattgaccacccagaataggacagagcatctctctccctgacttatgttcggccagcagtagctttgctgtcttcagaaagtctagtgatccacagtcacacccacaacacacatacacactttacaactcatggtcagcctatcacatcaggctgtctggctgtcaatcccatggtggaagctgcttgttatagttagacagccaactgctgctcagtagtaggtcttacactccaagtagatccgtagtggtgcatccagtcactgaatccatgctctgctgctgtgtgtgagtttagcttaggctcaggctgtgcttcaaaacttgtagaactatactttcatcagtggtctgacatggatgttcattttattctgtgttttcctcagagcctgtctttctattttacag

SEQ ID NO: 164 - DNA, 499 bp, Homo sapiens
  source 1..499: mol_type = other DNA
tcagtgaaacctatttgacatttgttcctgaaacttattgcaatttccagagttaatgttgtgctttgtttggttttgctggtgttacacgctcaggattaggttttaattcagatcttcaagacgcttacttggttgtagtgtgtgctgattgaataaagaaaacttggaaagttgttgagagagcaaggcatgggtgaaggagaaaattggttgagattggaaaagcaaaatctattccttaccaatgctagtttatttttaatagataaattgctcttcttttaagtgaataatttatgtttaaaaacaaggaatgtttattttaaaaacacaattgtatctggtatcttttctctttatcaacattcgtgtaccttttactattagtaacaagattatactaattttaactttaaggaatattccactgctggaatcagaacttcaaaatgatcttgctaaaattatgcaaatggttggaaaagaaaacgaaagt

SEQ ID NO: 165 - DNA, 499 bp, Homo sapiens
  source 1..499: mol_type = other DNA
gtatgacgcgcggcccgccggcagggcagtgcgcgctgagcgcgcggcacaggggagcgaggcttcggtgctcctgagacgcccctggcgccgagggccgcgtctgtgtcggcgccgcaggggggaggggaagggaagcgagaggcgggaagactccgttaacggcacgtgttaatcgtgagcgattttctagcttcagaggtattaaaatgtgagggggaataggcatcttcgaactgtggaaatagggccattatttttgataaggttcttcagttgacaaagagcctaaagtgtatgtgccacaggatattgatgcataaagctcggatgttcagttggattctcatctggctgcatgggatgaaagaggtagcgagcgcaggcccagataccaccctgcgtgatcttgcagggaagcccggagacacttagcccgtggctgtctgtatttttagggctattttgaaactgaccctctttaaaaaattcagttttt

SEQ ID NO: 166 - DNA, 499 bp, Homo sapiens
  source 1..499: mol_type = other DNA
gaagtgcctgcgctggggttcacatcagcgcgactccgtgagccttttgcttttcctgctctagacccgggtgtgcgcagctgcgacggagtctcacttagagtggaaccactgagcagaacatgtagtcgtgtcgctgcttttgttgaaaagtgtaatttttctctggttcctttttttgagggtttatgtaacatggacatgcaaaagacagaaagtaggatagttttggattgtaaccttttaaaaaattatttgacgctcaagcccctaaataacactaagcacacacacccgcacggagctaacttcagtgcgttaacactgggaaggtgggagggggccgcgaagccgagggaacccacctgcgctgtaaaatgtgccctcttcgcagcgcccccttctctggtcagacgtggccctgggttcctcagtgcctgaggttcggttcacaatgtccacacctgtctctgtcccctccctccgctcctccctgcca

SEQ ID NO: 167 - DNA, 499 bp, Homo sapiens
  source 1..499: mol_type = other DNA
tagagagggggcagctgaagctccaggagtgtgtggggctccctggggctggatggcggtggcgggcaggcgagctgggctgtgctcgggtgtgttacagtaaagacgcccagcttggcgctggcccggccttttcacggttttaggctctacagagagcggctgcagagctcacccggctggcaggagccaccgaggccggacacgtgggcgacttattgaccaagtggggaggaagcagccccgcactgctctcccgactgcggaccaccgttgggctcctgcgcatcctaagccccaccgcctcacctccagtccccacagcgttcgcgctcccagccggggtaagcggaagaaaacaaaggcccggctccatcagggcaccaatcccgctcgtcggcctctttctcggcctccaatgagcttctagagtgttatcacgccagtctccttccgcgactgattggccggggtcttcctagtgtgagcggccctggcc

SEQ ID NO: 168 - DNA, 499 bp, Homo sapiens
  source 1..499: mol_type = other DNA
tccagccggccggtgagcgcctggggaccgcagaggtgagagtcgcgcccgggagtccgccgcctgcgccaggatggagttcgtgaaatgccttggccaccccgaagagttctacaacctggtgcgcttccggatcgggggcaagcggaaggtgatgcccaagatggaccaggtgggccgagcctccctgcttgcccggggcggggaaggagctcgctgggccggcctcagggcctgagcggccgggcccggatctggggcaaggggcgcggcgagcagggccgacgcctgggtgttcccgtccccctttcctcgagccttccccctgtagggcccgggtggacgcggccgtcctggctgacctgtccctgcccccgcaagccgccctgggcatgagcgacttttgcgtggttcccggtggttgcgctccccgtttcgtcccctccgtgagcatcggcgcttaccggtattttaacccgagggttacacatctgaggca

SEQ ID NO: 169 - DNA, 499 bp, Homo sapiens
  source 1..499: mol_type = other DNA
catggtgggggacagtgggaatggggccttgaggaattggaagagagctgtcccttgctctgagttttctcaggtggaatgagagagggtttgggaccaggtgaaggtgctcacagagacggcagaggtgtggggcccgcagccgcgtgcccagtgcagccagcgcccaggggcctctgaaccctgccggagcaacccctctggcccttcagcacaaggactgtccctgccttgctgcctgtcattgtcccgagctccacactgggcttcctggagtggggactctccccagtgctgcatactcttcaagactggcctgctctccagccctgaattagggttctcctggggtcacccctaaagccaattctagagccttatgaaaggaagtggggggatggggtacttggtggggttcactgggcaccctagctcctgaagctgtcccctaacccccagccccagcactgaggacccaccctcaggccccctccctcca

SEQ ID NO: 170 - DNA, 499 bp, Homo sapiens
  source 1..499: mol_type = other DNA
taccgagcaccctcccctccttctcccctccgccctttccccttgactccccctactctgccctacatgcactggcttcaataggaggaggcacccctcctcccaggcccagcgattctacccattcctcatcacccacctcgttccaggcccctggccacagctgtccttcctggcatcagctcattccaactctacctctggggacccttgcaccagaagacagctctcctggggtggggcctggtgggggaggggcaatacaggggaggaacccaggtcggggtgcggcggggatcaggaattctaaagggctgaggtgtcaaagccccaagtacctggtccgctggagggaccgagagagatcatctagggctggagtggggctggggcttcccctctgtctctcagactctgattagagggaagtaagggtggggttgaaggtacagaaagccgagaggctgggctgaggccgggctggttgtggagcgatggc

SEQ ID NO: 171 - DNA, 499 bp, Homo sapiens
  source 1..499: mol_type = other DNA
tttgagcccggaaccaatgatccgaagccttctttcctgatgggattctttagcgaggacactaccgaggcgcgacttcctgacgcgcatccgatccgggaaggcgcacttccgctccccagttgccgcgggatggcaagccggcgtgggggaagggagaggtcggcggagacgagggagggaccatatccgggagagcggcagcttccgaccagtggtcgcgcttccggagaggcgcttccggtggcggcggcagcagcggctgtggtggttccgggtgtctttgtccccccggtgtcgctgccctggcccgcaggtgggttggggggccccctgccgcccctctgccccttcgcccctccgcccctccgctggccgaggggctgcgagggccgggcggcgaagatgcgtggggcgcggaaggggccgagcccctctttggactgcaagtcccgtctccctggcaacggcctcggccttgggggcgggcgggaggagg

SEQ ID NO: 172 - DNA, 499 bp, Homo sapiens
  source 1..499: mol_type = other DNA
tgagtagcagttttgtcactacctggttatgtggccccgggcaagtctcttgatctctctgagcatcagtttccttgtctgtaaaacagcatgacagtatcatgcaccactaggttattgtcagggcaaactggaacaatgtaatttcttgtttcatttctttcttctctatattctctccatccattgctttcattcattcttattacccacctccctgttttccgaaatatccttacttaagattctccacttttccgggtatagatggaaatttcccttataagctgttaatttctttctttttggattgaagccttttccccacgactctgaaagaggacagcgttcccaatgtcccagtttaagcgccagcggatcaacccgcttccagggggacgcaacttctcaggtgatcactgttctccctacctggcctcatcctgggaagtatgtgctctggagttagtttggggtttccctggtggagagcaatttg

SEQ ID NO: 173 - DNA, 499 bp, Homo sapiens
  source 1..499: mol_type = other DNA
cctgctttctacttctgaacacaatgagcagtttgtgtttgagggtttggggagggggtgttgttttttctttatgttttgttttttgttttgtgtatgagttgggtggcataacccacacgtaagctgcgacgtccaatcaagaacgaaaatgacccctcacaatcagtgatcgggaaccacctgccacaatcactagggaagtgacacagccgggaaactccgcccctcacacccccgcgcgctcgcgccggccgcagccccacagctcgccccggccgcagccccacagctcgccccgcctctctccttccggaaacaatccccgcgcgggcggaaggcggggtcggccctggccccgcccacatcatttcccttcctcggcccagccccacagcgcgcagcttcggcagggtggctttacggccggaggagagggtgggtcccagacctgaggtaggaggccgagctgaggggcggggaagaggctttttgcggc

SEQ ID NO: 174 - DNA, 499 bp, Homo sapiens
  source 1..499: mol_type = other DNA
tttgtgtttcccgggccgaaccgggttgtggggggcgcggggcctgggccaggcggcagctaaggcccgcggtgacagcatgggtgaaggggagcggggcagaggaggccttgggctgttttcggcggcgggtgggggcgaggggctggcgggtcagagtcccgggtccaggccggggctctgactcgcggttggtgttcccccgaccccgcagcgcggggtgtcctgtcctcgccatgaggccgcagcaggcgccggtgtccggaaaggtgttcattcagcgagactacagcagtggcacacgctgccagttccagaccaagttccctgcggagctggagaaccgggtacgcaacctggctccccacgcctgctctggcgagggagagagactcaccggggacgggaagggtgtgggcgacaaccgggcctttgagggtcccgcagttctggggaggtccaggcacagaaggggccttggccaaacgtgtaagaagag

SEQ ID NO: 175 - DNA, 499 bp, Homo sapiens
  source 1..499: mol_type = other DNA
gtaaagtatatttttatgaaatgtagttggtcttatgctttatttttctttatttagatgtttaacttgaactgttctgaattagggaactagaattccccttgaaacaagctgtgtgtttaacactctatcagttttcagctacacttcctctgatgttgggatgggtgcaagagatccgttaaatgttttgattttgtttttaaaaaaattatttctattttattttgtaaaacctttgtttcctgtctgaaatctgttcacaaagtgagcactacttgttaacaaaccttcttttgtcccgccacctctgtctgcattcgctttagttacattctccttttcttcatccttcccattttcacttcccccatcccactgtgacatttggagccaactatgatttaattctactatctgctttcattagcacttgcaagtgatattacctcacctaacctctctagagagttagaggatttttaacaatctgtgcttg

SEQ ID NO: 176 - DNA, 499 bp, Homo sapiens
  source 1..499: mol_type = other DNA
ggtaaccttgaacctgagtggtcagtgaactgcattgtccttgagtgggcagttgcctccttgtcttactaagagcccttccctggccttgcttgtgtgtgtatgtgtgtatgtgtgtgtgtgcatgcttcatttttgaggggaggcgataaacactgaattagacccaagttctattcttgattctgctgtgacctacggtaactcatttaacacctatatgccttacagctccgggtgaaagcactttagttttcaaagtgctgtaaaaatgcaaggtggtattgttagctctagtaactcctgggaattaattggctcctgaataaaagtaaattatgttggaataactttgatcccctccacctcaaaaagtaggtaattcttcatggcgccaagagaataaagctcctggggagctaagttttgtcagcttttaataatgttgaagcaccactatactaaccttatttctatctctttttaatgctgcctctta

SEQ ID NO: 177 - DNA, 499 bp, Homo sapiens
  source 1..499: mol_type = other DNA
gaccagtgtgtggaaatcactgaggagtccaaggctctcctggaggaatacaacaagactgtatcctttctgctcaactaggaccctaatgggtgctgtccctaagccctgtccttttgttccacctctagctctctctcatcctatcctacccacctatgtttgcctgttccccactttccatgaacttcctcactcagattcctattctcaccttgacctacaaccagacaatgcttctctccaagcaattcgtgcagtgggatgagctactttgccagctagaggccgccacgcaagtgaagccagcagaggagtgatagctgctccccatcccaaagtgggcctgggcagtcaggctccagggccctatgccaacctgcctttgttacaaggcagaggaagctttgtatttattggcttcaaggcccacctctctgtactctgggctctaaagttggaggtcaggttacctgaggtttgcaatttgcaacaccca

SEQ ID NO: 178 - DNA, 499 bp, Homo sapiens
  source 1..499: mol_type = other DNA
cagcttcaggcctttctgttgtaacctcagcagaaactttggggtttatcctttatcttgcatatgccccagggaggtaaagggacttgcctaggttcatgtacaaactttctgcttccagagcaggactttattgggacaccataaggttgaggctgggaggtacccaagaattcctggggatggtatgtcattgactgtgggtagaggggctcttttttcactattcccaggccctagtgtaaagttcaaagagagttcagaaataaggacagaagaagagacatacactagggggaatgtttacttaatgtatggccactcccttttccatccgtctttggactgctgttagggcacccatcctggagcctgaaagtgctcccatagccatttgctcctttggctttggggttaagcgtcatcttttttaggctccatggggagtgggagtccgtgatgaggcaggaagtttagtggaagatgtgggctttgccca

SEQ ID NO: 179 - DNA, 499 bp, Homo sapiens
  source 1..499: mol_type = other DNA
tggtgaagacgtctcttccagggagtcacaggaagcaaatccatccttttaaagggctcgcgtcccgcggccctgaaccggcgcgctggagcagtaatgcgacgttctccgaggttcaaggctcacggcccagccctgtgatccagtttcctcagtcttcgcggtgtgcaccactcaggacgacttgcggcttacgtccaggacaaagggggcttgtcctttcttcaacgtcctactgcgcaaaaacgaagcccttctcaggctgcctgccttccaggaaaagctgcgccccctcaggaacctgtgccccgcgcgcctgccgccgcccattcccggcgcgcacctggcagtcccgggctcgagccccgccctgccgccagccaggtgagaggggccaggccccgccctcgccggccccgccccgccccactgcgcctgcgcagtcggccgtcggcgccaggcgccggggcggcgcggccgtcgcagttcggcgggcgca

SEQ ID NO: 180 - DNA, 499 bp, Homo sapiens
  source 1..499: mol_type = other DNA
tgaggcccgcgcagggcgggcgtgggtcgtgagggagtgcgggctgcgggcgggccagcggtgcggcggtctgcccgggggcgcaggtgagcgcggcccgcgcggggcccggcggagcattgtccagcgggcggcgcccgcatagcgccccctgccggctgggccgcggcggggacccgggctgggcgggcctgggcctcggggcgggcgcgcgctcctttgttcgccggcccctactcctccgtgcccccatccccgccgccccccgccaacatggccgccaccctctcgtccccagttccccggccgccgccggccccttagcgcgcgctttgtttggagccgggcggggaggccggcgggcagggggcggcggcgctgcgcagtcgggcgcggggagggggcgctgcgccagaatgcaggcggggagggggaacgttgcataatcccgggccggcgacgggggcggggcggggggaggggcgggaccccggcgcga

SEQ ID NO: 181 - DNA, 499 bp, Homo sapiens
  source 1..499: mol_type = other DNA
gtaacgggctgggctgcccttcccctctgttcgtgggtgggtggttgcacagctcctccctcctgtctgccccagtgctgtcttccccagcacatgcaagccaagctgatcctgcgtctaaggaagtctagaaggtttaaactcacaataatttgttttcagtgcctttctaggagtgttgctgagtttaagtggatgcacagtttaagggcttaaatagccttgtttcccattattttcacagcaaagatttctgaagacgtctttctagaaatgactggaaagtttcaagaggcataagatacaggtaaaaccactttattcatgatctgtaatttcagttgagcagagttgataatgtgtagaggcctcagttggatctggcaggtggttggttgcttggtcccttggtccctgatatcctgtggggcaaagcttcagacttggctgccatcccttgggcccggcatggggaggtgggtgctgggcacccacagtg

SEQ ID NO: 182 - DNA, 499 bp, Homo sapiens
  source 1..499: mol_type = other DNA
caaaaaaagagccgtgatcatataagctctgaaagcaaaaggcaaacaaaaaagaaaccctcctcaccacagaatatgctggagtctgattccaaggtttaacaattacgtggctcctgtgttaatagaatcatggagggatcagcgtcggctcctgagcgtctgcagtcctgcacgtggctctggttttgcgattctgattctcttgatctaattgttggtgctgctactgcaccccacgatccctgtcttgagactgatctcccacactgcaaaggagtgacagccatgctatggaaccttgccacaccacggtggacaccgttctgtttggctgaaaaccagccatccaaaaataaaggaagatgaacagctctttagtgcttgtaattatgccatatgtgtttctgctttttccttctttgcctcatgaagatgaattttaaaggatacatatctggagctaatagacaattagatagtacttttttggttcaca

SEQ ID NO: 183 - DNA, 499 bp, Homo sapiens
  source 1..499: mol_type = other DNA
tgcttaatggtccactttaaggaccagggatgcacttggcattttcgttacttcattcggaatgagctgggaatcgctcttcctccttattcccttccgtgggagggaatctcccctgctttgcatgcagcctatgtcactcttcgagggctttgcctcctgaagtccgttctctccagggctgaaatctgcctccgctggtgctagttgagcattgctcgcttgcccgtcccatctgagctctttggccccagcccagctcaggagctgccctgggtctcctccccgaccctaggcctcttcagatctcccctccgtgctccgggcctcagtttcctccaggggaaagcagagggcttggtttggtgccttcctgcgaggtgaagcgaggggtccccctggacgaaggcgagcttggagccacccgcccagcagccgacgggagggcctggcgctcctcccccacccgcctgcccggccgccccgccccgagggcggc

SEQ ID NO: 184 - DNA, 499 bp, Homo sapiens
  source 1..499: mol_type = other DNA
taggggaggcgcgcggccccggccccgggcatctgggggtcccgggctgatttgagtccttcctctcccttccttcccggtcctatctcgcccgcgcctggagctcggcccggccgcgggggcatcgctggaaaagggcttcctcgctcacttttcccgtcttccaagggaccaaagagtgtggatgggagttgggggatggggagacgccggagcaggagaggagaggggccaggcctccaccccgtgattccactgtgctgctagcacctgagctaataacctcgaccccgcccccgggatgggggaactggcccggggtcacccctgcacttgggttgtctgacccgggcatgcaggggaccaccagctacggtctgggcggtgactctgctggggagtccactcagaggacccttgcctcctggacgatacctgtgcctgctctcctctccagctgcttcctctttctggggactgttagaaagttcttccttac

SEQ ID NO: 185 - DNA, 499 bp, Homo sapiens
  source 1..499: mol_type = other DNA
gtcaggtcaccagctctccacataactgtttttcccttctgttgtgtagccccggtgataaagctctctgctccctgcttgcatatgtattgcatgaatgtagtgagtaattctgagcccaaacacagcttttctggacagaagctgtcacagccaggctttgggtgtaaatcttccccttcatctttagacctgacttgaggttccatatatcgggaggtgggaacctgggggtatgcagttgcccatgaagattcatggaggggcctcgcgcagacagctgacgtccgctgtgtggcctcccctgctttgtgcatgccagcctccttgctaccatgtgtgttcatgcgcgcttgtgtgtgtgtgtatgcatgcgcacacatgtgtgtgtgtcttgctttctcatacctcattggctgcataaaatgtaggcctaagttggcatgttcctgtgacgtacctttgttcaagcagtcagctggcctctgttctcccacag

SEQ ID NO: 186 - DNA, 499 bp, Homo sapiens
  source 1..499: mol_type = other DNA
taaaagcagcttattacagaaaagaaactcttccactctgaagggctttctttgattattccgtcactctttttctttatttcttcctttttagtttattatttatttgattttgtttcaacaagaaaatgcttgcagttctcaacaccgattgaaaatgtgtccagtgctgccctcacagccctgccatgaaccctctgggctctgacctgctggctcacccatgccttgggttccgcactgcttagtcagacgcctgcaggctgctgggtggaaactaaaaatgataatgactgctgtgaacagttgtcagagagggagctgaagttttgggggatgcctgaggcacagtgcccaaccctgctggtctgggatgaatttgtggcccccacaaggaatgtagagtgtcctggttgtgctgggtgtgggggtctgagagcgaggccagtggacattcagggaacaccatgtccaggaaggcaggcggtggtggagatgg

SEQ ID NO: 187 - DNA, 499 bp, Homo sapiens
  source 1..499: mol_type = other DNA
ctgggcttcgctgacttgaacctggccgagtttgcgggctcgggctccacggtgcgctgctgcctgctcgagggatatgacacgaagaacactcgccaggacaactccatccttaaggtaccagggatcctgccacctctgccaccctgaccacgggatggggacaaaccaggctgctcatcagaatcctctggaggagggttgttaaaaatacaggccttacctgaataggtagacatcgggaaggggcgagccctggaatcaggaaaccactatcagagggaggcctggctccgctgttggcctcagtttccccatcaagttcagagagggggccctgacagtctccagggtttggcaagcacctgcagtgggttcacgtcatgctgattgcatgccctctcttctcttgtggtcccctgacagcagccccacgagctgtggtatctttgattagtcccagcttcaaatgggagggagttaaggcacagacgttaag

SEQ ID NO: 188 - DNA, 499 bp, Homo sapiens
  source 1..499: mol_type = other DNA
accacctcgtctcaatctcactttcccctccaggtctagcagacttggcctccatccacagggccttcttagcgcatgccctcttcgcacttactcccacttccctccccatccctcgatcctctgtccagaggtcccaagggcctgttcagaccctgaactctgcccagcagcccctcactctgtcctctaccagggcgccttccctggggctcctgctcatcctgcagtgcccctcccctcccaacccctgtgggggtgtcccatcactttccccagcacccacttcccacaggccttccctcctcccctgcctgctgacccggcagctcccgacagcacggccttgtttcccagggaacaatgcatctgtgtcacggacaacaatgtcctttcatgtcaggcgcactggccccggtgcacgccgggacgtggcacaaagggtgctttgtgcagctcagggatgtgagttcctggctttgccatgttggtgctgccg

SEQ ID NO: 189 - DNA, 499 bp, Homo sapiens
  source 1..499: mol_type = other DNA
gtacgtgttacagacggccacgccgccctttaggcggtcaaggtggggcgaggagacgttcgcccccctgcagtcggccgggtcactacccaagagcctttggaggcggaagcatggaacggtctgcaaacgttcccgagcgggcctctgcggctctggcgggcgtttcgaacttgggcgccgggcacacgcccagtcccgagagcgctgagggttcccttagcgtcgccctcaccccggccaacccgcggggcgccagagtcctggccctttaaacgccgcgcgtgcctcggcgtcttcgtttcgcgcgcccgcccgcggcgccggcggagcgaacatggacccggctgcgcgggtggtgcgggcgctgtggcctggtgggtgcgccttggcctggaggctgggaggccgcccccagccgctgctacccacgcagagccgggctggcttcgcgggggcggcgggcggcccgagccccgtggctgcagctcgtaagggg

SEQ ID NO: 190 - DNA, 499 bp, Homo sapiens
  source 1..499: mol_type = other DNA
ccgaagccgtcgtcctcgccttccgctctcgtcttcaccggcatactcaggtccccgctggggactgacactgcgggctcggtcgccgcaaggactggaaggaaggtggaagatgcggggcgaaagcggagcgagaagagtgggacgcggcggagcagcagagccgggactcagagctcccccctcgccccgcccctctccccgcccactctgcgagtcccgccccctctcgggcgccgggcggggccatcccggggctgtccgcggagacgcctatgcggtggaggctccgggcttcagctagggcgggggagcccagcagaaggaccgagcagcctggcaccccactttgccatcctctccctggaaatctcggggtcggcgggccggccgcttcgcgtgggcgaaatcagagacacgtggtttccaaggccccttcgggttcgggaaaattttatggttcgggtcacagtaggaagcggacaatgaggcgggaggg

SEQ ID NO: 191 - DNA, 499 bp, Homo sapiens
  source 1..499: mol_type = other DNA
atgaagcaaattctgggacactgggaaacgtagaattgaacaggatgggtggatgaggtcctggccttgtcctggcctgggtcagctccttaggagaacccaaggctgtggacaaagacggcactgggagagagcaggcagcctcagtgaggccgaggagcaggggagcatccctgggaagaggatctgaactcaataggggtcttgtacggagcaggggcttggtccctcgtacctctggccatacctatggagcccaggggatgcttggcagcacctgggaggtgccaaccccgggtggcaagggagggccggtcccacgctcacattgtcttctgttctctctctctctttatctgtgtcgatgtctctctctcttcccccgtgcccgtgccatcctctccacccctggattcctgtctctgcttggctttcacccacttctcctccccacccacggctgctcctcctcctgtccccacctcctccccgggtgcag

SEQ ID NO: 192 - DNA, 499 bp, Homo sapiens
  source 1..499: mol_type = other DNA
tatgacggccgcctgggcggggctgggcctggccgtccattccttgtggccacagcctcccgtgggcagaaggatctgctgagccggcctcacggctacccgcagggacccagccctagtgtttcctgccagtttctaaccctgggtacttgcactcatgacccctccaggcccccatcccagaagacttgactccaacccaagcctccttggtggcacctatgctagtgatgaagatgatgttaaggagatggcagctgtttactgagcacctactatgtgccaagcacacgctaagtgcttgcccttactatctgactcagtcctctcaaccaccctaagacgtgggtagtgttgttattcccattttgcagatggcaaaacagagtctcagaaaagagaagcagagtgtgattcagttttaggaaggacagaggaaggggtctgaggtcagggcctcctgggcagggggagctgtcctagttcctcaaaaccaatt

SEQ ID NO: 193 - DNA, 499 bp, Homo sapiens
  source 1..499: mol_type = other DNA
ctggagagataaaggtggagggggctcttcaaggtcctctcagaagtccagccatggcagttggagactggcttccaggacttgtgggtaggggcctgtctcctaaccctttagatgcgacagtcctcccgccgtctgccttgaatccccccactataggtaaatcccattgcctcttctccaggacttcagcagtgccaggtgcagctttctctgaagatccacctggcaagtcactggcctgtcctaacctgtttcctcacctttggaatctacaagttcatgggctatcacagcctggtctaaaagaagccctctaaacaccgtgtgtatttccttgtgggccaggcaaggctctgggggtgggcaggtgctatttgggtttgacaagagtttgttctgtgcattcctttccaggggacatccggaacctgctcatctggatcaagaagaatttgctaaaagagcggccagagttgttcatccagggagacagcgt

SEQ ID NO: 194 - DNA, 499 bp, Homo sapiens
  source 1..499: mol_type = other DNA
cggccaggaattctggtgctgattaacgatgccgactgggagctactggtcagtaccttgggggacatccctcccccagcccctgcccttgctgcttcagtgggaaagcgttgggcctctcctcaggcacatatagagtggctgggtaatcctccgccccactccagccccacactgaggctgctggagtctcccactccaggtgaggaagggatgggtagctggggacatgggagtactcctccatcctgaagatttgcaggttgaggtataggatacccatttttctggtagagtctgtctcttccagagcagccagtcctcagcccctgttctcccaactcctggggtggacctgggaaggtggccctgagggtctcccgctcccctctctcccgcaccagggtgagctggactaccagcttcaggaccaggacagcgtcctcttcatctccactctgcacggcggctgagggcccttctctgggcctgggcaccc

SEQ ID NO: 195 - DNA, 499 bp, Homo sapiens
  source 1..499: mol_type = other DNA
gtgagtagccggggctggagtggggctcctggggctggggaggggagtttgcctctggggtcccttctgggactcccacctgctaagatgtatccctcctctccagatttcccggcaccttcgtgggcaccacagagcccgcctccccacccctgagcagcacctcacccaccactgctgcggccactatgcctgtggtgccctctgtggccagcctggcccctccgggggaggcctcgctctgcctggaagaggtggccccccctgccagtgggacccgcaaagctcgggtgctctatgactacgaggcagccgacagcagtgagctggccctgctggctgatgaggtgggcccggtgccgcaaggtggggcaggaatgggctgggtgaggagcagcctgggcactgggatcaggcacatggggcctggaggggccctgttggcaaagtggggaccagcaggttaaagagggcatatccagctctgaggaaaggatcc

SEQ ID NO: 196 - DNA, 499 bp, Homo sapiens
  source 1..499: mol_type = other DNA
gccggagcaaggtctggtagaggacggggatggggacggaattttttgttctgagggcgggaggttagaagtcagcctctggcctcttccccgcaggtgaaccacctgcgctgcctccacgagttcgtcaagtctcagacaacctactacgcacagtgctaccgccacatgctggacttgcagaagcagctgggcaggtgcggggccagcactgctgaacccactggggccccctggctcccataccctgtccgtgggcagcatgagctcctctgggcaagtcctgtgacacaaagctgggttggagggctctgctggaacccactctgggtgcgggcatctcatgtgtatgagggtggagtggctggccttactgacggccaagtcccctggagcccctgagggtttctagggaatgcctgggtggggaggatggcagggaccagggggtggggccatctcacccttcccttgctttgcttttccctttgtgctgcca

SEQ ID NO: 197 - DNA, 499 bp, Homo sapiens
  source 1..499: mol_type = other DNA
ctaagcccctccagcctctgtcatgcgtgggcacacacttttgcaaagctgcctgatcgttgcaggggtgaggatggagaaaataatggaccgaatggcaggcctgtccattcattcaatggatgttttgttgttgttgttgttgctttttttttttttttagagacagggtctggctggagtgcagtggtgcagtcaaagctcattgcagccttcacctcctggattcaagtgatcctccagcctcagcctcccaagtagctgggactacaggcacgcaccaccacacccagctaattttttaattttttgtagagatgggatctccctatgttgctcaggctgacttcaaacttctggcctcaagtgatcctccctcctcgggctcctcaacagatgtttattgagtgtctacgatatgctgggcacttcgacgctaaacctgtggctggggccctgcctcctccgagctgcctcctgatacccacttcctcctcag

SEQ ID NO: 198 - DNA, 499 bp, Homo sapiens
  source 1..499: mol_type = other DNA
caagttagttaacctgagtctcaactcctccactcatcctgcacatgtttattgagcgtctgctatgtggaacctacattctagccggggaggcagagagggtgtagtaacctcagtaagcagtggcagtggaaatcatgtttggaggtgacccatcctaaggagctggataagggcgattggaagtcggggcagctgaagtgggcaggcagcagtataaaacagggtggacagggctgggcatggtggctcacacctataatcctagcactttgggaggccgaggcaggcagatcacttgagcccaggagtttaagaccagcctgggcaacagagggagaccccatctctacaaaaaatacaaacattagctgggtgtggtggcatacacccgtagttctagctgctctggagggctgaggtgggaggattgtttgagcccaggcaggtcgaggctgcagtgagctgtgatcgtgccaacaaagaataaatagggtcg

SEQ ID NO: 199 - DNA, 499 bp, Homo sapiens
  source 1..499: mol_type = other DNA
gtgagttgtgtaattatttcattatgtattacaacataataatagaaatgaactgcacactaagtgtaatgtgcttgaatcatcccaaaaccatcctcccgcctccatctgtggaaaaattgtcttccacaaaactggtcccttgtgccaaaaaggttggggactgctatttttttttttctttctgagacagagttttgctcttgttgcccaggctggagtccaatggcgctatcttggctcaccacaacctctgcctcctgggttcaagcgattctccagcctcagcctcccgagtagctgtgattacaggcatgcgccaccacacctggctaattttgtatttttagtagagacagtttctccatgttggtcaggctggtcttgaactcccgatctcaggtgatccgcccgccttggcctcccaaagtgttggggattacaggcgtgagccaccgagcccggccagggactgctgttctaagccacagcgggctga

SEQ ID NO: 200 - DNA, 499 bp, Homo sapiens
  source 1..499: mol_type = other DNA
tagagcctgtgatttgagccaaatctggagagatggccaccaagccagaactctgtgcagagaccaagtgctatggggcagggggctgggccggggattgctggaggctgacattcatcagaggattgggggagggagggcaggacccagaggaggagatatgaggatggaagcctgagcctagggactctcggagcccataaaagtcttaggagtctgtaatccagccttgtgagcagcctgctcatgacactggatattctaagccaggggtccccaacctagtccgtggcctgttaggaaccaggctgcacagcaggaggtgagcagcaggcagtggagcaaagcttcatctgtatttacagccgctccccatggctcgcattaccacccaagctccacctcctgtcagctcagcagcagcattagattctcatgggagtgtgaaccctattgtgaacagtgcatgtgagggatccaggttgcatgctccttatga

SEQ ID NO: 201 - DNA, 499 bp, Homo sapiens
  source 1..499: mol_type = other DNA
gccagccttctacacagcggcgcccctgacgtctgccggcatcctgcctgtcatgcaatcgctgtgcccggacggccagcgagacgagttcggcttcctgcagtacgccaactccacgtgagtgcccacccgcccctcggagcacccacccctccccagcccatccagtgagtgacatccgccatggtgcagggtcacgcagctgcttgagcgcctggaccgcgtggtggaggaaggcaacctgtttgacccagcgcggcccagcctgggctcagagctcgaggccctacgccagcatctggaggccctcagtgcgggcccgggcacctcggggagccacctggacagatccacaggtgtgccctgtgcagggaagttggggggcagggctgcgggcaaagctctgctgtcactgggctgaagcccacatccactctgggcccctccacctgcactgagttcccagccacgcacaggctgcagtggcagagctgtggtg

SEQ ID NO: 202 - DNA, 499 bp, Homo sapiens
  source 1..499: mol_type = other DNA
cggcttctgggctgagtctgggctgaggctgggctggcctgggctggggctggagcggcctggctactctcccttcatactccttcaggctcttgcactcactctgctaaccagctggccagaggtcagaggtcactgcccagagggggtcctttgtcctcccctgggctctgtaggcagtgccacacctgaaacgttttcggggggagagtgccagggcatgtgggcctgcactggctgaaaggaaaggaatgctctgggagttatggcagaaggggtggtgagtggctctttgacctctgacctgctggagtcattcgccccagaacgcttggcctgtagcccagctggggccagggctctgtgccgccttctccctaacgctgcttctccttcctgactttctctaaatttctcctctcggcctctgtctccctccccttctggattcctctctctctctctcccctttcacccccgaccctgccctctcccgtgg

SEQ ID NO: 203 - DNA, 499 bp, Homo sapiens
  source 1..499: mol_type = other DNA
gtacttccttctaattcacccctcccccagttatttcattatcctctcgtgcatatgtctggacctaattattacatgcgcatccttttaattgtcatgatctgtttcatcccttctattagagtaattttatacttttcccttcaatatgctattttctgggtggaaacttcagggaggcttttagcttgctaggtatcaaaatttcgttatattttcatgttaagtgtgtagtgaaagaagcttttcttaatatgaaactactttataatgcagttcaatcaaaaaagacttctggatctccgctacaaaaagattgtattttttctttattttcagttttataacatccaactttccattcaaaataatattgcacacattgtataattcaattaatttgcacatccaactcctcaaatctggtctttttaaaatgaccaactgcttaaacttcatctgtattgaaaaatacaacattagatccagccatatttta

SEQ ID NO: 204 - DNA, 499 bp, Homo sapiens
  source 1..499: mol_type = other DNA
ggcaattgctattctctgtgagccaacctgttacgaaaaataaaggtaacttttgagaaattaatatgaagttataattcagtggtatatggaatacatccagaatctatcccatgttaagtagcatgttctgcattttcagaacggctatttagaaagagcacctcttgagaggctgccactgattagctctgtgaccttggatgagtgagatcacctcttggggtctcctgtccttgttagttaagagtgacccgaaaggccctgacattgcttcgggcactccaattctagatcctctagctctggggaatgtggctggctcttacttcccctgctcccgtgctggcttttccttcttgctaccaatgccggggcgagggtccccacaatgtgttccacaggtcagtattgggcctgaaaatgcacaatccttccacttaggggacacacatctacctgtttcagtgatgattgtccttcctcttgttttggccta

SEQ ID NO: 205 - DNA, 499 bp, Homo sapiens
  source 1..499: mol_type = other DNA
ctcagacaaggcttttaccggaaatttagcatataggatagaaagcagagaccaaagacctcttgctttgaggctgttggcgtgctacaaggactcgaaagttatttgttcaacggatgacttctgttttctggaggcaaactgaattccgggcaggtggctcagcacctccagcctgttccagatcgggacagggaaggtgcctggggcaatcagtgaggtttccaaccttccttaggcctgggccagcccgctcccctcccatgtgaccccaggcaaccattttaatttttttacagccaagcgtagtggagaactggctgcgcgccggttgccagggacgcggcagccagcttggcggggctggggtgaaagaggacgctgcgtgggggagggctccgcggcttctgactggctggagcatcaggattcatttgcataatattttctgacggcttctgattggctgaagccagaggggcggtggtggggtgattcc

SEQ ID NO: 206 - DNA, 499 bp, Homo sapiens
  source 1..499: mol_type = other DNA
tgagttgttgcggggtctgggggagctgggaggcccggtttgggaagttttgcaggcaggtgcatgagccatctttctctgaaagtgtttaagaaatgttcaagaacagcggccagagtcaagaaactgggggatgaagggttatctcgagactagacggaaggaaacgtatcaggggaggggtggaggccagaaggaaggagttaggtaggggccctctcccaagctggcgtttttgctgggtggaatccttttgctagatcccttggatttccgttttccgtgtgttatcacactgttggaactgggaagaagagaaaaagaggcaagattttggcatttagtaagttaagtctgaataccgagttttcatccgggtgcatacgtacttaaaataccaaatgggtccaggaagggggacaaagtacgctttaatttatgagaagatcagctactagaaactgtatatctgtttttctcgagttttcttcttgcagtg

SEQ ID NO: 207 - DNA, 499 bp, Homo sapiens
  source 1..499: mol_type = other DNA
gtgagtttggggaaaatagagtgggcaggagggaagagtcataactactgcaataatattaaatattggtatattatcagcagtgcgatatcaagagtgtggctgctgtgtgcacgtggagtcatgaagttgctttgtgatagggtctaccgtgaatttccttatgcttacaaggaaaactaaatcatgatccattctaatatgtatcagatcctgttactcatgttgtctatttttgccagtattaaaaacctatttctaatgtgaattgacagaattaatgtaatgaatcagaatatattacatatagaaattaagtcattattactaacattatcaaatattccttctgatagaaattttacctatattcaaattaggattgccaataacatttatcaataataatgttataaattaaattgttggcaaggcacggtggctcatgcctgtaatcccagcactttgagaggctgaggtgagcagatcatgaggtcag

SEQ ID NO: 208 - DNA, 499 bp, Homo sapiens
  source 1..499: mol_type = other DNA
gatcaccaggtgggcagagggtagaaagggtgcactaggcagagggaacagctcacacatgtgtgcagaggtgagaaaccactttgcaatttctgggagctatggagatttaaaaacttggtctttgtttcgagagtgattgggagcttctgggggaactctcaacactcctacccctgccacactaggtctctgaagccggattttgtgctgatccgccagcacgccttcagcatggcacgcaacggagactaccgcagtttggtcattgggctgcagtatgctggaatccccagtgttaactccttgcattctgtctacaacttctgtgacaagccctgggtggtaagtaacaggaagggtgccactggcagagggaacagctcatgcatgtatgtgggagcttgaaaccagtctgcgatttggggaagtgagggtgttcagaaacttacagattcgtggtgaaggactcactgacccagctctcctggttctcata

SEQ ID NO: 209 - DNA, 499 bp, Homo sapiens
  source 1..499: mol_type = other DNA
gcgtctggccgcgcagtcaggccacgcccccagcgtagacgcacaccggcgtcggagctttccgcctattaccgggcagcgattgggtcgctataccgcatgtcacgccaaggacgcactctcattggccaatcgagtttctgccatttgttcattgcctcctgagcgtagtccagttactttcaggctcggggagtgaaggcctcgttgagagaaggtctcattcggtgttttgggaagagagtcgtgtgggcccaggtatcgtagcggcgacacgagagagacgggcggtgtgacagccttccactacctgcacgagtgtattggtaacgttggggtgggtgcactcttttggagctggaggaagtgctgccctctgctcccccatcccagcgctttggtttctcccacccggcagtcatggggacgctggatgagcccatttctgaagtgcggaggggccgggcttcttaggctgtgggcggagcctgggcctggg

SEQ ID NO: 210 - DNA, 499 bp, Homo sapiens
  source 1..499: mol_type = other DNA
tgcgtatgttctgtccacccagctactggttcatttgagtagatcggagtcagatgagtacatgtttacgggaggcgcttggttacgggatccagataggaatctttatctgagctgcttgtcagtttgttcgtctgtccctaggtctgtctgctatcagctatgccgctgcccgttgcgctgcagacccgcttggccaagagaggcatcctcaaacatctggagcctggtgagacagctaaaagcagatggtcctaacacgtgccagcctcgacaggcacttttgttgttgatactgacgcttgatacctagcatgggccaactgtgcaccaagcaatggggtggcaggcatttttcgttgttaacaatgtggattcctgacatccatccctaccgcgtgtcaagtggagggggttgggggaatagatatttcattctttttttttttttttttttttttttttttttttgaggcagagtcttattgtgcacccaggc

SEQ ID NO: 211 - DNA, 499 bp, Homo sapiens
  source 1..499: mol_type = other DNA
gtaacgctgctttgccttcctcactttccttttgcttcagccttgatgcttcctcattcgccccctgctctggcgcttccttgccgctcttctccctcctgcttccctggcactcaccgacgtggctgtaaccaggaccatctttagcttaccctgatgcgtgtgagaggatgccacctgccagacactctgtccccaggctggatgtggcaggggtggggggagagttgaggtgccatggtgaggactcaggtgcccactggtggtcatgcctggggagcacatagagggccacccacaggaaggagacgatccagcgcccactgggttggcagctagcagtgatcacgaggctcagggtgtgtctcctggcccccacctgtcagctgggaaggtgcacctggggcagcttccactgcactcatcacctgccccgctctgcgtggggccggccacacctgccaaagagcaacgcccgcatttgccacaggcccatttg

SEQ ID NO: 212 - DNA, 499 bp, Homo sapiens
  source 1..499: mol_type = other DNA
catggggcgggattgggccggttggtttctgagtgtgcgactcccagctcgccttgccccctccgtgatcaggagtctctggaccgtccattccgtggcggggctgcgtgtacatcatgtccctggcacctggcccgggccagaatcaggaggagtcccgcagacgtttgtggggtggctgaaaacactgagaagctgggggttgggcctcctgtccccactctttcccctgagtctcagccactgccacatggagatggcggtagaggggaccggggtgcagaacaccaagctctggggagacagcaggaggtggctgcgaggaaggcctgcccccaccactgtggccctcaggtgctctcggcctctgctgctgccaaaaggcccatgctggggacccttggcttcccttgcctttgccctcagtgtggaaagcccgcatgtttgctgtcaggagcgctcttactccagggattctaagctttgtgtcttgccttca

SEQ ID NO: 213 - DNA, 499 bp, Homo sapiens
  source 1..499: mol_type = other DNA
gtaaggcaggggcggtggggaggggccaacagcaaggtctccctatagacaatgtgcgcctggtgtgccattgtcccctggctgccggggctctgacaggactctcacttcccagcccccaggcccggcagctcctcatttcagggagaggccaacacgccccagcccctcctctccacacagataccttcactgctcccctctccccaagggaggccccagacagcttcccagacaggaaccaggccccataatcccctggccgagcgcacattttctccctcacagtccccaggatctggggaatgcccaaagatgacagctccagacctgcctgccagggtggccagagctgctctttctgagcgcattctaaacaaatggaaggcaggcgggcgtctgcctcacccccagccaggctcctgcaggggctcggcagtgctctcactcgcacctgccctgtgcctctgcagtgacaacgaggagaaggcctttggca

SEQ ID NO: 214 - DNA, 499 bp, Homo sapiens
  source 1..499: mol_type = other DNA
gcctctgagccccacgtgacgggggtggagccgagggcagagaggagcacctcgccccttccacccttctgcaaggcctcctggattccccgagctccccacaagatgacaggcgcatggtgggggcaggcagggggatcatcctcccaggccggggttggggcaacaggcaagtggtggctggaccgcagggggtgagcggtttctttcaaggcctcttgcctctgggcgctgttgagacagagtgctgggggtgcggggcgtagaggggcctggagccccgggtcaggctggggcgggagaagaagctgtccctctctgtgtctccagtgaaggataaggaggacacccaggtggactctgaggcccgaccgatgaaagatgagaccttcggcgagtacaggtgagccggggcaggagtgggtgctggcactcagctccaccctggccttcacatctcaccccctctctctcttctctgtgctgccgggtgacttca

SEQ ID NO: 215 - DNA, 499 bp, Homo sapiens
  source 1..499: mol_type = other DNA
gtaagtaagccatttgatttctgctgcctttgttttcccataaaagggcgtttaaaaaaatataattctccaagaaatctctagttgttttgaaataaaaagttacttttcgctcttcatctcatttattccagctattctctgctttgccctccttggtttgtggagcctcatacaaattcattagtacttttccagcgtcacaggttggaactgagggttccaaagagcaaaatgcattttggctgaagcagagccaggaatccatgttgtttgccattggcgccatccaattcacttgttctgaataagggaataaagttaatatttattcccttcatgattcttgtatttcaagaaaaaaaagtgctctacaggctttttccccccagcaggtactgattgatttgtttgaattttgagctgcaatcaaggatggagaatctaactgatctccttattcaccaaatatttatgatttgtgcatagaatattgact

SEQ ID NO: 216 - DNA, 499 bp, Homo sapiens
  source 1..499: mol_type = other DNA
tgatgactattaccagttttctctaagcctaggcccagccctggcccatggcctcagcccttggattgatatggcttatttaggtatttaaaggtcgacacctgcctcctgctgtttaattccctgcagtctgacagattcaccaattaccaaggagaaagcctgccttccttgtgctgtgtgtaaatgaggcttccatcagcacagacacacacacaggctgcaaatggaccagccctgcccccaattccacacccacggccacagcaaagaatgctgtgttccccttccccagccctcacacccaggttaatacctgggctcacagcctcagccccacacccaggttaatacctgggctaatttcattttttcactttttgggttttcagatgtacaccccagcggaatcaaaatgacagatttatgtcacattgtgggtttggatcagaaagcacccttgagcaacactttgattctgtgtttcttcccgtcctca

SEQ ID NO: 217 - DNA, 499 bp, Homo sapiens
  source 1..499: mol_type = other DNA
gtaagaataaacactgggacttttctatggctgttgaataatgtagtccttctctagaaaatgttgtgtgaacttagacttgttaacacaatagcagacttgtatgagactaaataaaaattatatgttgttatagtgagtggtattgaatagtgtgtctttgccaggaagagagctttgtaataggctgtgtcttgtgtagttgtgaactatttttttttcctaaaatttcttcagatgccaaccatgtctgtcaaactctggatgagtcgccttttacttagctttttaagaactctttttggattcactaacttttatctgcattattttatccatgctctattaagtgtctaggatcctgataattatgcattttctctgaagatatctatttccagtaaaatttgactatctagtgaagattgtaggcctgataatatattttgaagtacttgttatgatctgaatgtgtgtgtcacccccaaaaatgcatatg

SEQ ID NO: 218 - DNA, 499 bp, Homo sapiens
  source 1..499: mol_type = other DNA
cgagaacttgtcctcctccaattggaggttgactcacgcatgcttcctgcagtcaggttgtgtgagtgttgcaacctggtacccacccagggctggagagtctgcgtgcatatttgcttacaagtagaggagctgatttttgtacagacaagtacatttcaccagtgctgccagcacgttctcttggtctggaaggtcagtaactggtaccagagttggtacggtttgtttttcattgtttgctctggcttctgtgccggatgaggtcattcagttgcatacagttcctgctttcagaagttgctagagtgtttctctttgaacttgaactgtggctcttttgatatccagaaagagagttctttgtggggatggttaattcttgttttgggtgcttttcttcaccgctctaaggaactaccacagtcagaaggtgcattcttactgcgatctttttatttgctaccttgggcttaaggagcctgcctatatctactga

SEQ ID NO: 219 - DNA, 499 bp, Homo sapiens
  source 1..499: mol_type = other DNA
gtaagctgacggcgtttgtcggccggtgtgtgtggtcgaaaagatcatgcttgctctagcttcagaattaccctcttgagtcatctgactcctcatcacatgttggttgtggtacccaatttaaaatggaccgcaggtaaagtattatttttgtacgatgtggaatgggatttctggcattcacctggtatcatctcaagtcttttctattattggaagctctgtctttaataccttgctaattttaagaatgttcctccttgtatcacacaccagggcctgttgtgaggtggggggaggggggagggatagcattaggagatacacctaatgtaaatgacgagttaagggtgcagcacaccaacgtggcacatgtatacgtatgtaacaaacctgcatgttgtgcacatgtaccctagaacttcaagtataataataataaaaaaaagaatgttcctccttgttaagcaaagaagcagcagagatatgagtgatcaca

SEQ ID NO: 220 - DNA, 499 bp, Homo sapiens
  source 1..499: mol_type = other DNA
aaaaaaagtatattttgaagtataagtttttgtaattatattaaaagtggtatatattgttacctataaaatttcaaactgattttaaataatgccattttcatgaatgattgcctggaaatagatatcactttattgcatactgaagttgaagagataggaaatttaatttatatttaaattagtatattttaggaagtaaccaggatttgagaatatgtatttttacaagctctcattaataatatatatatagttttatatataatttaaaatagatatgagctataatgattaaaaactttgtgaaaatatcagcacttgatttctgatgctaagaaactgaagttccagactttagttttggagtatttggaaaagatacatacatgtagacaatctgcacgcagccagtgcagtgtacacctgtcatttaataaaaatgttgtgaaagaggtaactatccgcaaaattcagtatgatgatttttcctttttca

SEQ ID NO: 221 - DNA, 499 bp, Homo sapiens
  source 1..499: mol_type = other DNA
gtgaggggcggccgaagtctccgaggtcgaaggccgcacacccgggacctagcggggaccgggtccccctgggggtggggacggggggtgggatttgagattagggagactatccgaagtccagggccccgtacccggactacctggggactgggcctattggggtggggatcgttgggctggggctgggatttgggatcagggaagagcgatctgagtttaagcgccgcaaacctgggaccgagcgaggactgcacataatgaggggccgtggcgctgagatttgggtgacgggattcgaggtcgaggggcccgtacgtgggaccggcaagaactggacccactgggatcgggagacgcagcgtcggaggtcgagagccgcacgcccagacagtggtcccacgcggtgagcaccgcgggctgagattttggagtcaggaaagcgcggggaaggcacggacggccgggtgcgttagtccggccccctggcggggagctg

SEQ ID NO: 222 - DNA, 499 bp, Homo sapiens
  source 1..499: mol_type = other DNA
ccctatcccctcccctcccctcccttctcctctccagaaacgtcctcgcttgtccgcctccaccgcctcccccgccagccgtgtcggctctgctccgcgcccagccggccaaccggcggctcagctctggcgcgtcacaatgcgccgtcgcggccccgcccccggacgccggacgcagaaactccgccctgccgcggtccttgcgtccttccggctccgtcgtggaagcaggactgcgccgcgtcttcctcaaggtggggttcggggggccaccgaatcgctgtcacgccggcaggtagcagggggtggggacgcgggctccttgggcttctgtttcctggtgtccagggcaaagggctgagccgggcagtagggcctagtcggggcctggctcgccgggagcaggagggcttccggcaaagccgcgtgcgctcgacgggcaggcgctgaggattggggccggcagcgcgcctgaccccgcccctcgtaggctccgccc

SEQ ID NO: 223 - DNA, 499 bp, Homo sapiens
  source 1..499: mol_type = other DNA
agggagtgtgggttgagggaagccaccgatgtggcagaaaaggaagggaaagcaaaaggaggtaaagaatagacagcagatgaggggcctcagaggtgccagctgactttccaggcctggggtgaggaatggggcaagggagcaggctgcacgaggagccacagagaaaaggacatcttcttttatttgcgctagtatgacatgtgggctgtgttacgagctttgcttctttagtctgcaccggatagcagaggagtctggtggcacttgggaaatgttataatctgcatgactgcaaatgactcaaagctttgctcaactttttgaagggctagggggccttggcagctttccatttagatgttttctggagactgactgttggcagctgaaggagccccagggtttctgggtggcctggtcctgcctatggagtgactgagcctagggacctagtcccgcctccagccctccccttgccgcctgcccaggcccgtct

SEQ ID NO: 224 - DNA, 499 bp, Homo sapiens
  source 1..499: mol_type = other DNA
tgagtgccttgttcccaagtttgaagcgtctgaggttgggggtaagagaccgtttgaggaagggagttgccttgtataggaaagagacagggtctcgaagctggaaactgaatttggggcggtgggggcagtgttgaggagcctagaatgttctgactccaaagtgacctgtttttgttagactcataggatgtcactggggatcattaggaacttcctcatggagttgagaaaaatggggcctggggaggaattgattcagcttagcctagggagcccgactgggtctcgtcctcttgcacccatgttcagaccagagctgccactctgagctgccacagctgttgtttgtttgtggctttatcctacttcaccttctgtgggagagggtggatcagataagcccagcagtggggaactgaatgctatagctgtgtcaggtgggggctggctcttctgtaaacaaccctactattctgtttcagagaaactgaccctt

SEQ ID NO: 225 - DNA, 499 bp, Homo sapiens
  source 1..499: mol_type = other DNA
gtgaagatggcggtggccagggccggggtcttgggagtccagtggctgcaaagggcatcccggaacgtgatgccgctgggcgcacggacaggtccgcgagaacgggcgagacctcagtgtgggaagggggtacctgaaatttggtgtatcgggaggggggatcgtagatgccgcggcggcagcctccgggtagggagtggaggtggcgttgatatatccagaaaatggggtggaggatcgcactgatcctgcgaagtcccgggctcggacctctgcagcccctgcgacttgaagccttcggagcggctggagagcgggctcgcttctgacctgttctcttctgcgttctagcctcccacatgaccaaggacatgttcccggggccctatcctaggaccccagaagaacgggccgccgccgccaagaagtataatatgcgtgtggaagactacgaaccttacccggatgatggcatggggtgagacagagagggtatgct

SEQ ID NO: 226 - DNA, 499 bp, Homo sapiens
  source 1..499: mol_type = other DNA
tgggttgaggtgactgagacatgcagatggaaacacggactgaaactaaggagccaattcagggccgaattgtgtgttgcactggcgtctaagtgaagatcaacccatttggagaacagaacaacaagcaagaccaacaggtgaatttgaagaatgatcatgtttggggatggaaggaagtgcccgtgaaggagaggaaagcaagcagccagagaagagagtaagacaggctcatttcactagtacagctcctgggggaggtggttaagctgtctacctgagttgctcaggttccgagttcccatcatccctggatgggtctaagtcagctcagggagaaaaaggacacaacattctgaaatgtcagagacctgcctggttttcccttcttcccgcttatccttcccagcctctatccaacccttggcttcccaactgcgtatttaaaccccgcccctgttgaacccttcggcttttcttcactcccggcttcctccgt

SEQ ID NO: 227 - DNA, 499 bp, Homo sapiens
  source 1..499: mol_type = other DNA
gtgagtgccctcctcctgcccatcccggaccccttcccccacctcccatcctgctcccctccctgtccctggattttttcattccttctcaggccacacttgagccaggactggcatcctgggacagaaaccctgggcccaggtcccaaagggctgtgctttctccccaggagcctggagcagatgcagtcctggatcactcgcatcaatgtagtagccgctatgttctctgcgccccccttcccagctgctgttagctcccaaaagaagttcagccgccctctcctgcccagcgctgccacccgcctctcccaggtagcccaagctctgtccacctagtgccagtgggatggagggtgttaggctcaggcccactgcactcaaggctgctgcgtgtgatcgtggagatgtcccctgcaccaggatgctggccacaggggtgagcagggactgaaatccagcccccactgggtcccgcttgccggctgggaacccaaac

SEQ ID NO: 228 - DNA, 499 bp, Homo sapiens
  source 1..499: mol_type = other DNA
gaggtgatcacacctgcagagacgaggaggagctgagacgctctctgtctgagttggccgaccccaaccccaaggtcatcaagcggatcagcgggggcagtggcagtggctccagccctttcctggacctgactcccgagcctggggctgccgtctacaagcacggggccctggtgcgaaaggtgcacgcagaccctgactgcaggaagagtatgtggccgagttgcggggggcgggcgtctaggggatggatgggagtgggcctgttccagggccccctgacctgtcttctctccccgcagcacctcggggcaagcggggctggaagagcttccacgggatcctcaagggcatgatcctctacctgcagaaggtgcggggtcaggccagggggctggggctgggactgagttggctggtgggtgtggggtgatgggtgggaataggaggggctgggccaggctgcatttggggccaggacaagatggacacccctgca

SEQ ID NO: 229 - DNA, 499 bp, Homo sapiens
  source 1..499: mol_type = other DNA
agaggccctcccagtagtcacgttaagctagtactgacagaaaaaggaaaagcctgtccaggtggctgggcaaccctgcagcgaggcatagatgagcttgtaaatcaaaggaaatgaccaaggtgagtctcaatccttttagaggtttattttgccaaggttgaggacacatctgagaaaaaggaacacaaaatcacaggaacatctgtgatctgtgctctttccaaagagggcttgaggacttcaatatttaaagggaaagagcaggcagtaggggaaagtggaaagtaaaaagggaaggtagataaaaggggagagtagttgcattctttggggcctttgatcagcattcactgaatgcgcatgttacattcgtgaaaggaggtcgtagaggaatagtcagttatgcattcgtctagtgcttggtgaatctgcatttttacaagattaaatatagggtagaggaagcggtcaaattgcatttttctccagcgagagg

SEQ ID NO: 230 - DNA, 499 bp, Homo sapiens
  source 1..499: mol_type = other DNA
tgagtgagccatgaggtcgggccacaggctctgaagtcgtgaagccttgggacggagcgggtggtgcttcgaggtcagtgtcacgggagggaggtcagggtcagggtcagacgtggagccccgtggagtgcggagtggtgaccccttcgttcgggggcggagggatgactgagcatttataacttttgtgtatctccccgtgggtgcagcccttggccagcgagatgctttgacacagccccttaagatgttttaagggctatcccataaagccgggaaggcacaacgggtggagctggcggccgccgggggcaggcacttttgagctaaggaggaagcgggggagggaaggagggcgggaaggacgcgccacctacttcctgaatcccctgcaaaccccagaggagctcggcctgcgctgcgccacgatgtccggggagtcagccaggagcttggggaagggtgaggcctgcccgccgcgaagagggggtgatctcgg

SEQ ID NO: 231 - DNA, 499 bp, Homo sapiens
  source 1..499: mol_type = other DNA
cgtatgccttcctgcaggatttctctgtcttcctgtcccactcttgacccttgctttagccacactggcctcctcgctgtttctgtaacgcaccaggtgctcctgccgcagagcctttactcgcactattccttctacccaggatgcttcctccccaggagtcctcctgtttcatgcacttaccttgattctggcctttgcttagatgtctcctcagaagatcttgcctgactaccttattttaaaagtgaaactctcctatcccggctttatttttctccttagcatgtatcaccctctgaaattctgtacattgtttgtttgtttttgagacagagtctcactcactctgtcacccaggctagagtacagtggcgcaatctcggctctctgcaacctctggctcccaggctcaagcgattctcctgcctcaggctccggaatagctgggattacaggcgctcaccaccatgcctggctaatttttgtgtttttttag

SEQ ID NO: 232 - DNA, 499 bp, Homo sapiens
  source 1..499: mol_type = other DNA
tgtgagacaccatgcccggccctggtggtttattcgctatcttcccctgaagaatgtgacttccaggaagggaaaggttttgtctatttctgttccttgttgaatctctagtacctagaaccatgtctggtcctgattaggcacttggtgaatgtttttgaatgaatactctgagctgttctttaatcggtcctcatgatcctcattgtacagatgagggaactctgggcgaacctggcctgggtcttgagctaattacgggtaggtcaggttctgtacccaagtagtacacacagtgatgggcggggtggcctggggccgtggtttgtcaacccctacgctggagggtgatgttttggtacaagaggagaggtgccccaatgcgtcctgtgtctgtaattgatggcgttgtctgtgtttccccaggatgtggttctgagacagtccctgtccctgatggcccacggagcgactcggtggaaggaagtcccttccgtcc

SEQ ID NO: 233 - DNA, 499 bp, Homo sapiens
  source 1..499: mol_type = other DNA
tgcctaggggacgggccctcgcgctggagttaagcggccgggggtggagctccaggcctagcggggaggtccacggagattggcccccaccccaggctcctttgtgtgcctctgttacgcccaggacagacgccgggggctctccctatgcccctcgtccccacagccttaccccatttactgctactccgtgcaccacagcagtggctggggtgatcctctgaaggccagggtggcagcctaatgcttggggcagggtctgtggcccccctgagttttgggctctgcgtgtgtttgcggggtggggatgtggaggcgcgcagccccagggctcactgtgcgctgtggttcaggcttccaggccctggtgctgacagccctgttggtggggctggggatgtcagcggggctgcctctgggggcgctcccggaaatgctcctgcccttggcgtttgtcgccaccctcaccgctttcatcttcagcctctttctctacatg

SEQ ID NO: 234 - DNA, 499 bp, Homo sapiens
  source 1..499: mol_type = other DNA
gaatagggcttgggattcgagggtgggagttcatccagcatcagagtcctcctctctaactctgttatttgcctctcttgtgctgctggacccagagagaggtactatgcctattttccccctcctacacctggaccagatgcctggaagcacccaagctcccctcttctgccctgccccttcccacccgctatgctccaccattaccctccacctcagcatgcttgcctgtctacccctcccccccaagaaggcagcacctatgggggaccagctgtgggcagaagccctggaggagctgtgatgggcagggaggacgtgggtggggtggggaccaggctcagcactggatggtactgggagacactgaggtgccccttccccaacagggactttgcctacgtagctcgtgataagctgacccagatgctcaagtgccacgtgtttcgctgtgaggcacctgccaagaacatcgccaccagcctgcatgagatctgct

SEQ ID NO: 235 - DNA, 499 bp, Homo sapiens
  source 1..499: mol_type = other DNA
ggggaagtaaggacctgagccgggggtagggggtggtactgtgagagtgtgaagggaattatgagagatgggaggtctgacctgcccacaagcaggctggggaagggggatattggcccatcctaagtggcagccctgtgggatggatgagcgaccccaggccaggaccttgggagatagtcgcctaacaacggtggagtcaatgtgagagatgacacgtgacctccactagagtgaggcctgcagggcgggcggtctgacaccaaagcaggggccccagagctgtggctaacatcccctgagctgcaggggtcagagatcagccaccatcctggctggagtcccactgagtgcctgcttctggtcctgcagggaaaggatctgctactgcagctggaggatgagacactaaagctagtggagccacagagccaggcactgctgcacgcccaacccatcatcagcatccgcgtgtggggcgtcgggcgggacagtggaa

SEQ ID NO: 236 - DNA, 499 bp, Homo sapiens
  source 1..499: mol_type = other DNA
gtggctaaacaaaatgtaattgtcagtgttttgagtacattttaggttagtcttacagatctgcaatgcagtgacagtgccaggatctgaaatacgttgtaattgaatgaaggcttatagatctgtatgttagcagtgtctaattttggtgctctttctcgttccaggtatttcatttctcctgtcccctcccctccccaccccatctattaatattattcttttgaagattcttcgttgtcaagccgccaaagtggagagtgcgattgcagaagggggtgcttctcgtttcaggtacttgtagatttattttggggaatccttttgaaaaggccagtctcaaaaagtagttaacacagcaaataagtccgacttaatgggctgcaattttcatttgaaaagttcttaagttttcattgacagccttctaagaactgccatctgaagaataaataaaatcaattatttgcctttcctttgggtccgagttcagtcttca

SEQ ID NO: 237 - DNA, 499 bp, Homo sapiens
  source 1..499: mol_type = other DNA
agtgttggccaggccgccgtgcggtcatggccggatggccgacgcctgcagggacgaggccgtggcggaccgaggcacggctgtgctcggacggcgagggagcgtggctcggaccgctagcgccgtggcgggaggcacgcgggccggcagggaaggccaggccgttggcgcgggaccagggaaccgcaggcgtcccggagcctggcctcccggcggggaggtgtgtaggacctggagtcggcaggggctgcccttcgtcggggaggaaagagagagtgatgatttctgccccttttgtcagcagaggaggccgtggcgaggcggttgtcagtcccggggggatttatggtgcaggagggggcccgcttggaggcggcgggtgggcaggaggccgccttcctgcttggagaacaaagagctgggcgccgggctggcgggggtggcctcagctgctcctccccgtcgagcgacccgggcctcgcggggaggttgtcggaag

SEQ ID NO: 238 - DNA, 499 bp, Homo sapiens
  source 1..499: mol_type = other DNA
gtaggggtctcctgccccctgcacttccatgggcagcactccagtggggcttgtcaatgtctctgtagatgctgtgtgtggcctgatgaggaggccgagtgccccggcatttgacgctggccaagcagatgggcactgggcctcagaattatggtcctttcttcctgacaacatgttgccataccacttctcccccagaccgccaactttccactggaaaatggagtccctttctagtcatatgtgtgcaactatgagagaggataaagagccatggttaaaaccatgggcttcagagtcaagggtttaatttgctgccctttcatacacttattgtgtggcatgggtcatgctgtaactccatgaacctcggtttcttcatctataaaatgagactagactattatctgtctggtaggggagttgtaaagtgtagataaaataacacacatagaatgcttaattcagagcctggcacaaaggaggtaacaaaaaacat

SEQ ID NO: 239 - DNA, 499 bp, Homo sapiens
  source 1..499: mol_type = other DNA
cagggagctcagtgactggagatgagcaaaggaaggattgggggcgatatcagagagatgagcaggatcaagctaggcaagctgcaaggagtctggattttgtgtggtgggagccactggcatttctgagccattaggtggagaagaggagggaggaagggagaagggagaaggaagaggcaaggggagcagatgagagcagcagagtggggaccacctgcagcaggtccaggcaatatccatgggcgcagccataggatggatgggccgatggatggaggaggtatggatgaacaaggcccacatctcagtggattgtggatttgagtgggtttggagatgatgttagaccttcctaggttgtgctcttcagagcagaatgaaaccacaactctccctctgcatcctacaacaggtcagttcaccgtttctcccttccatggggggaaacagacaagagggctcctttgtggactaatcagagtaatttgtgtttgca

SEQ ID NO: 240 - DNA, 499 bp, Homo sapiens
  source 1..499: mol_type = other DNA
ctgctaggtgaacgtgtactccagatctcagccagccaggtggggggctgagtggaagtgattttaggtccttttcacgatcaagcaaagtgaggcccggccaagttgggcagccagggattgtggcagcctctgtgggctctgccattccccgtgcctcacccaccctccttcacttggctgctcagctccctcctgctctttctgcccctcctcaattcacgcttgctttccagccctggccaaaaacagtgactgggtggaccagttccgggtgaagttcctgggctcagtccaggttccctatcacaagggcaatgacgtcctctgtgctgctatgcaaaaggtacctgagccctctcccttctcctcccttggatgggtccctggggcagagggacgcaggtgtctagaggcagtaaagggctcaggccctgggacaggagggatcagcagaggaacagacagcagctgacgtggctccatttgtcacctgtag

SEQ ID NO: 241 - DNA, 499 bp, Homo sapiens
  source 1..499: mol_type = other DNA
tgacttcttccaacccagccccttccttccatggccccaagctctcccccaagacttgtgatgaagaggccatctcctgtcaccctcactgcaggccaggtgaccgccctcttgcttcttttctccctcctgtaggggaataaatgtagccactttttccagttaaaaaacatctctttctgcggatatcatccaaagaacaacaagtaagtgggggtgggatggcagtggaggaggcacgggtggtctgcagccttgaggtgggtgggtgtgggccgagcccccgtcccagcacagacagacctgtccctgcaggtactttgggttcatcaccaagcaccccgccgaccaccggtttgcctgccacgtctttgtgtctgaagactccaccaaagccctggcagagtccgtggggtacgtgtacaccctgctgagcacccagcccgagggagcacgcccaatcccaggccctggggctgcttcctggcgctcagctttg

SEQ ID NO: 242 - DNA, 499 bp, Homo sapiens
  source 1..499: mol_type = other DNA
gtgagtcccgggtccgagccttccgcgcggggatcgggcggttgtccggcgggtcgtccttcgacggcctcctggcctcgccggagcgggtgcggggaggcccacgcagcgacggctggaggaggggtgggcggggctgccgggggtggggtccccggggcggggcggggcgcgctgtgtcgcgggtcggagctcggtcctgctggaggccacgggtgccacacactcggtcccgacatgatggcgagcatgcgagtggtgaaggtaaccgcgtataggatgacccctttctcttggctcccctcgcctcccgcattccctcctccctccatcccctccgcggctctccgagcacatttatttatttgtctgggcaccagggctggctgaatccctgtcctccccgccctctactcagaggaggactggcctgcaagagtggccagagctggggttttgggggtttggaggcctctgcttgagccgttcgcgtggtgaa

SEQ ID NO: 243 - DNA, 499 bp, Homo sapiens
  source 1..499: mol_type = other DNA
ctccagtcagggcgacagtgaaactctgtcagaaaaacaagaaacaaaaaaactgtgaggtactgagatcacaaactggtgctcaaaatatactgatttcctttctcgtctggactaaacgggggtagggaagggtgagaaggaggggatcggccctcccaacaagtctcatcttccccagatgctgcttggtgctcaggggctgcaagtactctgtccttgcacagagggttggggactccagctgtgcatgggggcacacattaggcccacagcttgtaatggaccagtagtaaagtaagggaggggaagcagactctctcttggaaaggaggctcctgagtccttcttggggcttcccccaccaactgtttcccaaaccagcatacagtaggcacttagtaaatactaaacctagtaaaggactgaatgatggtagaccgaacccccaaagcaaaagagaaagggtccaacagcgcctccttgcggtgctctgccc

SEQ ID NO: 244 - DNA, 499 bp, Homo sapiens
  source 1..499: mol_type = other DNA
gtttgtcgggagggagcggggcgggcctagctgggggcgaagagtaggcctgggttgggggcagaggcggctggagctgcttgacacctgggggctctggccggagccgccttgggggctaggcaggtgcagcggataggggctgcgggcttcgccgcggtcattcttcgcaacgccgtcctagggccactaggacccgagggtgggacttttccgtcgcgccataggcagctgcggcgcagacgcggcgctacccgggtcgggcccgagggtgatgggcagcgacccccggcggcctgggagagcggtgggcggcgcgaggccgggggcggggcggagcgggtggggccgagctggggccgccaggatgctgcgtctctggagatgggaggttagcaatcattaccctcttcccagcccaggaccctcgtgccttctaattcttgcatttttccgaatcccgcagtggcatcttccttactttgtccatcctccggac

SEQ ID NO: 245 - DNA, 499 bp, Homo sapiens
  source 1..499: mol_type = other DNA
cgatgactgatcgtttaagcagatatttccagaccggcacacagtaggctcaccaaagaatggaagcgacctttatttcctgagttgcaggatcggcctctccctgggcctgcccttgccctgcgctatcgggcagacgaactctccccaagatagagaccacagaggaagacaaagggtaatccccgctgccgcccgccccggacgctagaacgttctctctcctcaccagcgacgaagtcgagaacactgtagacaccgccattttccccacctgcaccggaaaccggctgcgcgggcacttccgggaactcctagccgcccggccagccgaccacggcagccacggaggagctgagccggaaggtgcgtccctgcgcatgccggaagtggcggtgcgtgtgacgccggcggcggggggggcgggacctggggcggagagcggttcgcgcgcttcgggcctagtccggactcgccgccgccgccgccatattcccgg

SEQ ID NO: 246 - DNA, 499 bp, Homo sapiens
  source 1..499: mol_type = other DNA
ggaccctccattttccatatccaggaaaatgtgatgcgccacaggtatcagcgtctggatcgccacttcacgttttagccacaagtgactcagtggaagatccagagtcaacagaggctcgtcaggaagatgtctacagaaaaggtagaccaaaaggaggaagctggggaaaaagaggtgtgcggagaccagatcaaaggaccggacaaagaggaggtaggggcccttgtggggacagtcagcagaaatatactggaaataggtgggctggcgtgaagggggcggggggatggattggttttaagaatttcattcattttgaatagattacttcccacgcccgcagcagtgtgcaaagatgtacacaacactggccttgcctctgaaggactttatctggggtgattagacgtctacaaaatagaagactgccaaaagctagtctagataatgtgctgtggggactctgagggagagtgtatccagttagggtcagagg

SEQ ID NO: 247 - DNA, 499 bp, Homo sapiens
  source 1..499: mol_type = other DNA
gtcataccccaatattttgttcccctcctatcctcctcctcctcctccagtggactgtctcatccctgtattcctcatggaaaaaaatagggtgggatgaggtgctccccaaactccctcatggcctgggccacagatcattaaaccttacacaaatgatttaaggcttttcagcccttcaaaccatgtgtgttcccagctctgaagacctcaaccaaccctgatgaggagggcacatcacccctgtctgctccagtgagccccaacaggagaaaaacaggccattacttacctgaagccacaagcggcagtagcagccctgggtgtagggtcagtggagggtaccaaaaccttctgcctgaaatgggtgccccacccagtagggagttgcagctgaaagtatctgatgcagaagcagtgactatacgaaaggaggcccctggggagggccaggccagaggtctggtctcagtttctgcagctcaagcactgtctggat

SEQ ID NO: 248 - DNA, 499 bp, Homo sapiens
  source 1..499: mol_type = other DNA
ctgcatcagatactttcagctgcaactccctactgggtggggcacccatttcaggcagaaggttttggtaccctccactgaccctacacccagggctgctactgccgcttgtggcttcaggtaagtaatggcctgtttttctcctgttggggctcactggagcagacaggggtgatgtgccctcctcatcagggttggttgaggtcttcagagctgggaacacacatggtttgaagggctgaaaagccttaaatcatttgtgtaaggtttaatgatctgtggcccaggccatgagggagtttggggagcacctcatcccaccctatttttttccatgaggaatacagggatgagacagtccactggaggaggaggaggaggataggaggggaacaaaatattggggtatgaccacagccttgtaaaggttggtgtggagtgagcatggaggggggcctccagctgagactgtgctctgagaggtccctcttttttccag

SEQ ID NO: 249 - DNA, 499 bp, Homo sapiens
  source 1..499: mol_type = other DNA
taggtgggaccctggctggctcccattagttggccaggctgtgctgtgctgcaggttcccaaagctcaagataagagatgcgttctttccttcactccctgaggtcaggggaggagtctggggctctgtagagagagctgtccccaggcctctgggggggatgagggagaagacaagtcgtaaggagccctggagatggcaaaagagaacccatttggggagggaggctgcagtccccttcagaggtcctggctaacaatacccttcctggctgtgtcccaggtgtccaaggcagcagcagacctgatgacttactgtgatgcccacgcctgtgaggatcccctcatcacccctgtgcccacttcggagaaccccttccgggagaagaagttcttctgtgctctcctctgagctcccctgtcccttctcacaactcctcccttttccctctcctgggcccttccttaggtcagtaattgttgtgagccccttaggctcc

SEQ ID NO: 250 - DNA, 499 bp, Homo sapiens
  source 1..499: mol_type = other DNA
actttctttatatacttggccccctgcatttcagggctccaccgccatctgtctgtctgagtgtaaagtggaccttattggcatctgggctgccaaactgctttttttcctttgctttgcccagccttctcttgaaggctaaattcttgaaaaattatattctttgtgttcctatagtaaatattaagctttatatcaacacatatggcaggatctgaggctctttactcacctctggtccatttctctagtcttttctctgtagtctttttgttttcctgtcctccatctcctaatttattagttttattattatattttatattatttttttgagacagagttttgctcttgttgcccaggctggagtgcaatggcgcgatcttggctcactgcaatccctgcctcatgggttcaagtgatttgtctgccacagcctcctgagtagctgaaattacaggcacgcaccaccatacctggctaatttttgtatttttag

SEQ ID NO: 251 - DNA, 499 bp, Homo sapiens
  source 1..499: mol_type = other DNA
tgagccacagtgcctggcagtttgttttattttggttgaacagttacaagtcttggtttgttttcctgcagcaacaggtttatcttgatatgatacagcgttatttaaattccttttcattttcctgcctttgtcttcacatgctagtttttttcagttgtttcttttttcttcttccttttctttttttttttttttgagagatagtcttgctgtgttgtccaggttgcagtacagtggtgcgatctgggctcactgcaacctctgcctcctgggttcaagtgattctctcacctcagcctccggagtagctgggattacaggtgcccaccaccacgcctggctaatttttgtatttttagtagagacagcgtttcaccatgttggccaggctggtcttgaactcctgacctcaattgatctgcctgccttggtctcccaaagtgctgattacaggtgtgatccaccgtgcctagcctgtttagttgtttctaagaag

SEQ ID NO: 252 - DNA, 499 bp, Homo sapiens
  source 1..499: mol_type = other DNA
ctagtttttttccttttcagattgtgagactaacagatttatagaggcagtctgtgctctgaattgttcagcttacagattgaagtctatcaaccctttatagtatcaggttatttgttttgtataaattattttgcttttgttgattagctctatcaaagaataaaaaacctcccaagatttctcaatcttaccgcccttctttatgctttctctgtacaatggaaaagtagaccaaaagtatttgtcatgaaaattttttatcatttgcagtttgtggcatgatatggcttttctgtttcactgttggcagttttatgcatgtcctgtaggataacttgatcgttttgttacatatttatgtgtgtatatatacatcctgtgtgtgtatatatatatttatgtaatttaaaaaataaaaagcatgctgcttggcttggctagctaatgtgtaattgtacctggtaaacaatttttttctttgaaattctgatcatag

SEQ ID NO: 253 - DNA, 499 bp, Homo sapiens
  source 1..499: mol_type = other DNA
cagtttcccagagcatcctgcttttctctcaaagaaaattggtcaagtggaagagcaaatagataaagagaccaagaacccaaatggggtatcaagtagggaggctaaaactgcattggatgctgatgacagattcactttgctgacagcccagaaaccacctactgagtactctaaggtagaaggcatttatacatattctttgtctccatccaaagtttcaggagatgatgttattgaaaaggattcccctgaatcaccatttgaagtaattattgacaaagcagcatttgacaaagaatttaaagactcatataaggagagcacagatgattttggtagctggtctgtgcacactgataaagaatcatccgaagacatttcagagactaatgacaagctttttccactgagaaataaagaggcaggacgttacccaatgtctgcattgctcagtaggcagttttcacacacaaatgcagcactggaagaggtgtcc

SEQ ID NO: 254 - DNA, 499 bp, Homo sapiens
  source 1..499: mol_type = other DNA
gtaggcggcgcgggcccgcggaggaggcgcggtggcggggcgggtggcggcctctgataggagtgcggccgcaccggggcggggctaagcggctctggggcggggctaagcggctctggggcggggctactggagagacgaagcttgcgaggcgggactagggcaggggcgtggctaggaaaagtcgggatttgtggcggcggggcgagaccgtggtggtgcgaatgcgccccctatgggggagggtgcagggctgagctgggaaggttgcaaggccagggtccagtttgggggtggggggagaagtggagggagggtagaggtgaggagaatctgatgcgattgcggaaaggttgagttcagaaatgagggagacagatgcagaaacaggagagaaaatccagaagtaatataaaacgtgtcttggcaaggagacagggctgttaccacgggcagagccaaggaaagaaccgaggtccttataaagagcaagtcagag

SEQ ID NO: 255 - DNA, 499 bp, Homo sapiens
  source 1..499: mol_type = other DNA
gcctgcttggtacagagcataccagggaggagaggctggagactggggactggggaggggctgggggtcagaccttcctctggcagaggccggcttctgtggacttctctgctgatcttgccttagagaggcctctgccctccatgccccgagctggtccccagcttggcccgatcacccctgtctgggcccagtggcccttgcacagagtaggtgctctgtgaatacttgtgaatatccaggacaaaccaaaaggcaagagacaggtgtggttagtggaaggcgctctgggcccaggctctgcacgcacctccggcctcaagttactcccttgcatgtggggaaggggagcgagcctgcccacctcctccagcggttgagacctgggaaaggtgccttaagtgctgcggagctgggctagtggtggtcacaggagtagccactagaagggatgaatggttgctccctctggtcgctgacctccacctccatgtcccca

SEQ ID NO: 256 - DNA, 499 bp, Homo sapiens
  source 1..499: mol_type = other DNA
gttggcatgcttcagatgatggttgggtctgatctttcttggtctcttttggggagagaattttagtttgtttttttttttaaatctgttcagtatgtttagatctcagtctgatcggctgccctgtcgctttgttttaaaaagcttttccctctgatcctgtaccccttgggaaatagaaggactcttttgtggcaaatgtagggagtttctgcctatgtacggggaaaggagaacttggctgctattgtataggttgttgaatttttgatagatccttttaagagttcagaccctcagtgtccaactggccaggaaaactgaatgctgatcttggctaaacttatgaagacaaaggtgatcttgttgaagaattgggcttttcccacttggtagggtgtaactaggtttagttgtggtccggcctctcgtacaaaagtgactggtgaggggagtggaggtgggtggagcccccagtcccatcaggactgctttacaa

SEQ ID NO: 257 - DNA, 499 bp, Homo sapiens
  source 1..499: mol_type = other DNA
cccgggccgccgccgcccccgcccgtgggctcgatgggggccctgaccgcggccttccccttcgcggcgctgcctccgccgcctccgccgccgccccctccgcctccccagcagccgccgccgcctccaccgccaccgtcccccggcgcctcgtacccgccgccgcagccgccccctccgccgccgctctaccagcgcgtgtcgccgccgcagccgccgccaccccagccgccgcgtaaggaccagcagccgggcccggccggcggcggaggaggtgagtcgggccgagagagcgcgagaggcgtcgcgcggacgggcccggccgcctgaggggcgcgcggcggcggcgacggcggctgcacgcggcaggggcgcgcgtgcgcgcacggggaggcccgggcggaggcgcccctgggcgcgcgcggcctggttctagggcctcgagtgcgcacgcgcgctgtggggggagggctgggcgggcgggaggcgctctgtgcgc

SEQ ID NO: 258 - DNA, 499 bp, Homo sapiens
  source 1..499: mol_type = other DNA
tgggggcgggggactaagatggacgcctgggaagggaactgggaggcagcggggtgcctgggggccgagggctgaggacggggtgcggaggcgcactctgggaatgccgagagggtcccgcagagacgtcagggcgcccgtgcgggccggcggggagctggggggctaggggcggacgcccgacgtgatggcccttcccgcaggcgccgcggctctgctactgctgctgcccgccaccatgttccacctgctcctggcggcccgttcgggccccgcgcgcctgctgggtccacccgcgtccctgccggggctggaggtgctgtggagcccacgggcgctgctgctgtggctcgcctggctcggcctgcaggcggcgctctacctactgccggcgcgcaaggtgcgggccccgctcgcggacgctcgggggagggaagcgaatgggctcggcgagggaaaggacgccccgggccttatcagagcccccttggacccgcag

SEQ ID NO: 259 - DNA, 499 bp, Homo sapiens
  source 1..499: mol_type = other DNA
gtgagggacacaggaccccggatgcccactccaacctgctcccctgacctgtgctggcttctgcttggagaagacatgtcttctctcttcccactgcaccagtggcccccagatgtgagctgagagtgccattgtcaccacacctttaggaggtgtcagttcccctgggtgatgccgagacaccttctcccgctttgtttcttgtccccaccatcttctcaaattctgttctcctcttatcatatttcatcaaattagagttgagacatttcagctctccctgtttccctggccctcttacacgcaaccttctacacgctgaatgcagcattttttgacagctagaggagcgggagaaggagcgaaagagaaagagggaggaggaggagcggcggaaacagccgcctgctcccgaacccacagccagtgtgcctccaggggacctggtgggcggccagacagcttctgacaccacctgggacgggtgagagccaggatg

SEQ ID NO: 260 - DNA, 499 bp, Homo sapiens
  source 1..499: mol_type = other DNA
tgagctgagattgcgccactgcattccagccttggtgataagagcgaaactccgtctcaaaaaaaagaaagaaagaaagaaatcacctgtccccctggatgactccccaggggccgtggaaagatctcacatcctggtgctaactcatatctctgccccccgcccccagatctcagagaagctgtctcagctgcaggcacggcgccaggagacagctgagaagtggcaggagaagatggactggcttcagctgggtgagctgccaagggggccccaggccctgtggggagtggggggcatcctgcaccctgtgggttccagagtaggtgagactaggaaccctgggtgtgaaactcacgatgcccaatcttcgtgctgcctggcacagctctggggcagtggctttctctgtgtccctgttcttgaggttgccatggccactgtgccctgccagtggccactctgacccaccatcttcctgcaacccccgatcctgcca

SEQ ID NO: 261 - DNA, 499 bp, Homo sapiens
  source 1..499: mol_type = other DNA
gtgagtgtccgccgcgctccgcacggtcctcttcccgcggcgggtcggagcgggtggacgtgcgccggcaccgctgcgagggacgcttatgtaagggtcgcgcgcgcaaaggcggcgcgggctccgcgagtgacggctggaggagacagcgacgggctgtgcgcggtgcgcgacgcgacgcagcggacggcgcccctccccctcgcgcgggggctcggccggctggacccgcccccggacccgcccccggctgcagcccccgagcgcccctccgcagcgtccgcctgcgggctgcctcattcttgctctcgggcccattttgcagatggagaaactgactaaagcgcctcgcgcgaggtccctgagggttcgaacccaagtctgtcaggatcgggagcccaagttgtccccatcgtactggatgtggctcagctctgcaggaagccgcggcgtgtaaggcgagggctttccttgttccttgctctcgcactccgcctcc

SEQ ID NO: 262 - DNA, 499 bp, Homo sapiens
  source 1..499: mol_type = other DNA
tcttctccgctagccagcgcgtatctgcgtctagccgggatgcctgagccccagtgcgaactgttgtgcttgcagcttcgggagacacgtgctactcgggtgaatgaatcgaacgtccccacccccgccgacagccaataactgcgagccacagcccggccacttccgcctattgcgggcgtcggctagggtccggcggcccacgtgaggctccggagacaagggagtaggcggtggtgcgccaggggcgggctctcccagcctcgccacttatccaggcgctcgccggggacgggaggggcggggctgacgtggggcgccaaggcttaaacgtgacggacaggcgggcacagggaggagtccagagcctaggggcgaggagtgacggagaacactgcccaataacgggaggggttgggctgtctgggccaataggaagtccgtaaggcggggccgggactgcagcaagttcggttgcacggagaccgcagctgttctc

SEQ ID NO: 263 - DNA, 499 bp, Homo sapiens
  source 1..499: mol_type = other DNA
gttagttcatccattcaatcttccatctacttatttatccacttattcatgcctcctagaatgtcttactgaaccctgcttgcatatgctacaatccctccaccccgacatttggctgtgattcatgagaggtcgttagtgtcctaaatttctgacactgggtgggtgtggtatgggccatcataaagggtcaaaaagcaggttttagtgtgtggaggaggtagggatagtttcagtagaaccctgctacctctaattttgtataatttcataatgccagtctgcattctggattcctatccctacacttgactcccattctcatccctccttgaacagcctgcaaacagctttgttgatccattatttacttaattatcagaataactttgacagtggtataattgttattatccccattttacagatgaagacactgaggctcagagaggttaagtgactcagccaaggtcaaacagctagtaagtggtggagccag

SEQ ID NO: 264 - DNA, 499 bp, Homo sapiens
  source 1..499: mol_type = other DNA
tgggttcttccgctcaggctgggtgaagcgcttccgggtcgccgccggcagcagcctcccggcgcggtaagtacagacgcaaggctgcaaccgtctccttgccccttcattcctttttcccccagagaaacccatttcctttgacccgactccccaggagctccatattgagagtccttaacccttaaagagctccagctcattggccgcttcctcgagactaagccccaccccgtcacacaaggtccgtcattcattggtgtcacttcctgtcacccagcatttctttcagttaattggtcctacccaggccccgcttttttcgcgtttagcaaccctataaggccaaatttctgtctgagacccgccctgctttctttctgttggtcaactgcatggtcattatcgtaatgagcaaagaaagggcggtggctttgcgacggtgggttgggctttcggagccgagatcgctggtctgtcagtacttcttggacatgag

SEQ ID NO: 265 - DNA, 499 bp, Homo sapiens
  source 1..499: mol_type = other DNA
gcaatgtttctctctgtctctgttgggcaggggtgcatacatgtgtataggtgggcctgtcaggctctgcattcacccgtctggaccagaggggtctgagaagcaccagttcctgtgagttgtcagcatgagatgggagtgggtaggcgatgctagatggaaacaggaccccatcacggaggtgggcaggataaggcaagggtcagataccatgacagcctcacaagaggtgccaaatcccagcaggctgagccctgggtagctgagttgaagcctgcagatgaaacaggagcagggacccacctggcacaggggaattctggatgacagttgtttgccaagagctcagccttaaagctcatccaggggtcaaacttcttgaggaaaccaggctctgatcataagtctcaggacactgtataacctaacacctgctaatcctcattcaatatccatgacagctcaactgagagcttctaaagaatatacctagagccag

SEQ ID NO: 266 - DNA, 499 bp, Homo sapiens
  source 1..499: mol_type = other DNA
cttaacaagggggtcagggagtcagggaggcaaaagaactttgaaggccctgagaacaagaaaagagcaccctggcctgtgggggcatctggtgggcagctgagatggggctcccaggatgggcccaacgatcctagaagaaaaagtagggacctggatggaatgtggggtggacgggctgctgggatgcctactggatgactccgagtccagctacagtactgccattgtcaccagcgtgccaccccctgtgccacgtgcaggttataatcaattggcaagcacattgaatgactgattcctgagccttcacctcacccccctccctcacccccgcccacattctgtactaagaacacagaaatcatattctcctggctctccagcaagagctgcccggcccaggctccactaggccaagacttattaggcaatctgtactctgccctgtccctgcctgagctctactctcacagtgatcacctctctctcctttgca

SEQ ID NO: 267 - DNA, 499 bp, Homo sapiens
  source 1..499: mol_type = other DNA
gtgagttttgggaaacaaagagtatggcgggcaagtacctagcaggttctgaatatttgttctttaggagtcaccatttaaacaagaccccaagagtgacattaggtgtaaccaaagtgaaattgttgactacttgatgagattcgtgaggataggcattaaatgatatcttttaagaaaccattggcagtcctggagctgatgaccctagtgcaggatcattatggttgcttctttcatcatctcaatttgatgacatatttgaattgaacttaaactatacctaagccttaatcccagggtctactagtgattcagctcagcacatctaaaggcaatgattattcaagaggattacattggtatctcctgtcacaccagcatttagtattctatacttattccctaaatatatctcgttgtcattctccgatatttaccatttaccaatattaccaatatgcctagagcatagcaattgctcaataaaagtgtattg

SEQ ID NO: 268 - DNA, 499 bp, Homo sapiens
  source 1..499: mol_type = other DNA
aggagggagggtttatattgtattttaaagatcaaggacaacagcctagaggaggtggcatttaaggtaagccttgaagaaggagtttaatttcaacagagagtaaggctgggaataatgcgatgtgagaatgatcttgagaagaggcacagagggtaggttcagggcagatccgttgatagcattcactagagtgtaagcaaaaggtgaggaaaactgaaattgtaggttgaaatttttgtttctgcgagtatacttatttgcatttgcacagaaggtggtgatccttatatttatttctgctgtgcatcaataggggaggtggagataaataatttcattgttttggctctggccagaattcattaggcacagtttgttgtccatagggaggggaacacaacacacactggcctttgtctcccttccacacaggctggtggagattctgaggcatttttaaacattgcacttagccattcagatgataacttggatc

SEQ ID NO: 269 - DNA, 499 bp, Homo sapiens
  source 1..499: mol_type = other DNA
gtgagtctagggatgttttgctgagcagcctgaaagcagactctaggattcccctgagatgagataaggtggtgtttgggagtaagtttaacttagatccttataccagttgtggttatgcatccacagatctctgccttctttccacaggtccagcacataccgggacctccggaagggtgtgtatgtgccctacacccagggcaagtgggaaggggagctgggcaccgacctggtaagcatcccccatggccccaacgtcactgtgcgtgccaacattgctgccatcactgaatcagacaagttcttcatcaacggctccaactgggaaggcatcctggggctggcctatgctgagattgccagggtgagaggaacagggcttggccctacacactctatgcacactgcactatacagagaaggaattaggagagagaaggggaattagcagaaggagggcaacaatcagtttaaaggattatttaacaggggtata

SEQ ID NO: 270 - DNA, 499 bp, Homo sapiens
  source 1..499: mol_type = other DNA
aagaagaagggatgagaggacaccaatatctgagacatcagtgtgtgcaaacgtgagtagaggcttaaatcctatccttggacttgtaggcagctgcaaaacgcaccttccctgtttcctctaatgtcccaatctaaaagaagcagtcagggaggagggtgcaggtaggatcgatgaaagggcattcactccagttcctcgttccagttccatcactgcccccaccacacacagaagccctggttagtggtgtgattaaacacaggtggggctgccacatgttgagcacgtttcacagaagtggtgtgtaataccaacctgcttttctgagatgcttgaacaaaccccttctctagaacttgctgtagaggttccacattcaccctgcctggcactttctctaccactcggatggtaccactaggttccaaggcagtaagagagtcaatggttccttttctcggggagcttgacggagccagagggcggaagagatgcc

SEQ ID NO: 271 - DNA, 499 bp, Homo sapiens
  source 1..499: mol_type = other DNA
gtaaggaccatccccccagctccccacctggctctagctgaaaatgacaactacaactggagctggctcctgcgcccacgacacagccattcatgcttttggtgcacattccccttaattaccaaggctcccaattaacgtgggctgctgtgtctggtgctgggttattttctcctatttttccgttcctcggggtttactattgcagagagacaccaggtctgtcattgtgcctgtcttgctcccttcccaccctaaccagagggaaaccgaaaagcaacagctgatggcaaatccgctccggcgcttgcacgcctcctcggcggcagtctcctgttgcttctcggagcttgactgccctttggaaaaatctctccgcccctcgagaggagagaggagcagaggacgcgcgcgagcacagagcgggaggacggacagggagaggaggagagggggtctgcgcgcggccgctacccagaagccagcggacggcagcacg

SEQ ID NO: 272 - DNA, 499 bp, Homo sapiens
  source 1..499: mol_type = other DNA
tatatttcctgccttggggttttgagacctgaccttttattaaaataattagatcatctagggcagagctggaagagacctcaggatcatctagtccatctccctattttcccaaatgagaaaacaggcccagaactgagggcagcagaggcagggctaggtttcttcctagcagtacccatcatccccggcttggggtttgtaaggaactctccgtggccctacctaggcttggacaatcacagcctttctcagtagctcctccctccacccggctcggccatacacacaccttgactgaggctggacagcctccatctcagcatggctcctggctactgacacttgtgcctggcctctgccccttcctacaagctctgcccctaatagtaagagccaatttcttgagcactcactatgagctaagcctcccatggggtcagtctctaatcaccattttcccacgtgaggaaatagactcaggagctgagtgcagaga

SEQ ID NO: 273 - DNA, 499 bp, Homo sapiens
  source 1..499: mol_type = other DNA
ctgggtaccctcagtagatgttctggagatgttgagagcatgttgtaggggcttcgatttgggaggttcagtgggagcccgtggaggtttcaggcatctaaggcaaaaagaaagaggggagagtttgggggagggagaacggattgtcaaaaacaccctctcaaaagcgtgttaaagcctgggagtggagggtggtctaggagagtcgggagggcagggtgggaggagagggggatgtgtggtggtggtggtggtggtggtggtggtggtggtggtggtggtggtggtggtggtgatggtggagagcccagctgcaaagatgaacaaagcgggcgctgtgcaggctgggggaggtgctgctgtgggaaagggtgggtggggggaccttgggctccagccccacaagggcgtcttctttggctggccaggcggacgggacgggggacgggggcggggactggcgggaggggggcgggacaggctcgctctcctcctactt

SEQ ID NO: 274 - DNA, 499 bp, Homo sapiens
  source 1..499: mol_type = other DNA
taagagcgccccgtcccactacacttgcgggtcccattcgctgcggtgctaggactggataaggggaagtccccggggcctggcgagagccctgagatcagctctaggctagggagctcggcagaaacccgtgggggagagagggcaccccaggtgagtgcgtgggggcgaaaggagcgttatggggagttttcctgtgagcctcttgcttttgccttcctcggccgctgccaacgccaccgccagagggggccgtgacgctctcccccccttggagaaactctgatcctggccctatccagactctcccgccggcacccaggcggccgggcggacactcgcggggtatcgggcggcgagcgcgcgcgcgggttttcgtcctccagcgccccacacctccccctctccgcccacagcaggaccttggggcgggggtatctcctgtgacgtctccccgcctgtccccaggccggccgccttgatggaccaggaagggatt

SEQ ID NO: 275 - DNA, 499 bp, Homo sapiens
  source 1..499: mol_type = other DNA
acccagtgaccccacaagaacccccctgcttcgcccccaggagaacgcctgctccaagccggacgacgacattctagacatcccgctggacgatcccggcgccaacgcggccgccgccaaaatccaggcgagttttcggggccacatggcgcggaagaagataaagagcggagagcgcggccggaagggcccgggccctggggggcctggcggagctggggtggcccggggaggcgcgggcggcggccccagcggagactaggccaggtgaggcgggcggcgcgcggctggctgacagctgcccttccccagccctccccaggagcagggggagaataagggcgggttggaggtgcagggggcgtggagggagctaagggttgggggatagaaatccgagatgggaggtgggtgggaagaggctgaaggttgcgcggattccaggagctcacctgtttctccctctgcatcctcccttctgccccgccctggaccgaag

SEQ ID NO: 276 - DNA, 499 bp, Homo sapiens
  source 1..499: mol_type = other DNA
actgagcattttcaaaggtaatgaacacggcccctaggcggcggggtgggacccgtgagtgggagaaaaggatcgaatccccagcccttccctctgcccaccctcacccctcccagccggggaaaatgcaccctgcccctgcgggttttctgatacatccagacgcccgaggctgcgacggggacatacctggaccaagacatgcgcagccaccccatttggctgcacaagcccggccaaggggcagaaatacatcgcggcgcgcacacgtacctgccgcggggctcatttcagcgctttgactcggggtgggggttctgggtgactggggccctctggcactcaccgcccaaagaatcctggtactgaaagggggaagggtggggggaagaggaagtagcagaagagggcaggttctcagaccttttctctcctcagttcccgaggagagatggatgccgcgtccccttcgcagcgacgagacttccctgccgtgttt

SEQ ID NO: 277 - DNA, 499 bp, Homo sapiens
  source 1..499: mol_type = other DNA
gggactcagtccctgcagttcctgccaggccttgccagccggggcgagggttgggatgatcctggcggcctatgcctgtgtgggctgcccctcccgctgtgaaccctgcatttgtcccgcaagttttcactcaggtagactccctgggtacaagggtgcctgctcagcagtcgggcatgagctgctccgatgggcgaaggaggttgtctatcccacagttggagaggggccctctctgccccagtgggcgatctgggctacggccaagttgccaccagctagttccgcttgaaaaccacttctggccccgtgggggactcaagtcgccaagcgagggttcccctgagcgccggagctcacaggtctcgccttgtcccgaaagccccgcaatcgaggcggaggcgaccgagcccccgactctcctagaacgttgccacaagaagggggaacgtcggaacagtgcatcatcgggcggcggccggggcggcggcaggagggc

SEQ ID NO: 278 - DNA, 499 bp, Homo sapiens
  source 1..499: mol_type = other DNA
cgcagacactgaccttcagcgcctcggctccagcgccatggcgccctccaggaagttcttcgttgggggaaactggaagatgaacgggcggaagcagagtctgggggagctcatcggcactctgaacgcggccaaggtgccggccgacaccggtaagccctcgccgaggaggggtctggccgggccggggccggggccggggcaggagtggcagcgccctctcccgaggccccgaggccccgaggccggtatccgcgcggacctgatgcagggctgtgggacgagggccgctggggtccgggcaggggcctcgcagccgcagccccgtcggtgcgtcgagggggcagggcggagcacatgatgccccttggactatggggcaggtaaggacgttttgggtctcctggaggaaggtggccccggggcgcgcactggggctgtgcccgccaggcgacggggttaggagcggagcccgaggctctgcgggagaccgggggag

SEQ ID NO: 279 - DNA, 499 bp, Homo sapiens
  source 1..499: mol_type = other DNA
gtatgaaagggggtggtgtctggagggaacaggaagggatcctggagaccttctgctctagtaaagtcaagggaggacgggccaagcacgcagcctcctcggtttgcctttgttcctgggaacccctgttgctgtcagggggttactggagcagtgaagggcggccagaactccccagctggtgcacagcagggtcgcagaagggagctgggccagtggaagcccagaagggctctgaggacctttgggctgcccctttggagtctggtggagttcctcccgtgactctgagaggaggaggagaaggtttcagagaagggtagttgaatggctggcctggactttcatttccccttggggtcagacccaggcattccccgcccataggccaggtcgaggttcctcctgcagaactggacctgtagctgagcattcctggtgagacaaaagggcatgggggaagactgaggaaggttgggagaaggggctctgagaatgg

SEQ ID NO: 280 - DNA, 499 bp, Homo sapiens
  source 1..499: mol_type = other DNA
actgtccgattcctcagtcacctattcctgctgctaccactctcccatcctctcactcactttcatctgtccgtctctctgtgtgtgtgtgtgtgtgtgtgtgtgtgtgtgtgtgtcctctctccaccccatcccaaccttgaaggtgacagaggagggaatagacacaaagcatacagacccccagctacttaagggtcaaagccaaggatcttaccctctcctttagccctgagaattctgaagcccaaactcccagtagccttgaccccctgctctgtctcagtcaccctgaccacccatcctggcatggggtgaaagagacagacccctccagacctttctggaccagctcccagcccccagctgtgcctgagccctccccaccccctccctgtcgcctcagattcccctaatccctgctcccctgccctcccctctgccccacttttccaggattctgattggctgattctactgactgggctgagggggaggg

SEQ ID NO: 281 - DNA, 499 bp, Homo sapiens
  source 1..499: mol_type = other DNA
atgggctgctgggttgggggccatgggaattgggagaaggggtttctcactttccttccatttttccgccctaccaggtcacacgacctacaagtagggagcagggaaagaagagtgagcctgcatgccaattctaagctcttcaggatcaaagtaagcaaaaaggaggggcaaagagtctccctcccctttaaacagcccatttttccccaagaggtgggaggggcaagttgtttctatgatctgggagaaatgacaggagaaacaagactgatacttggcttagatgataatatagctctggaaacttttttgctcttcagtgggttttgggtttggaagataaggggagacagaatatgaatttgggtgaagggttggggattaggctttgagaaaacagaggtaatagagggtttggaaggaacctgaagtaggaggcactgatacttgtcaaatggggaccccccaccctgagtccctttcaccctgggggcag

SEQ ID NO: 282 - DNA, 499 bp, Homo sapiens
  source 1..499: mol_type = other DNA
atggcagcctgtggaggcacctgcaagaacaaagtgactgtgtccaagcccgtgtgggacttcctgagcaaagagaccccagcccggctggcccggcttcgggaggagcaccgtgtgtccatcctcatagatggcgagacttctgacatctatgttctccagctttccccacagggtcctcccccggcccctccaaatgggctctacctagcccggaaggctctcaaggggctgctaaaagaggcagagaaagagctgaagaaagctcagaggcagggggagctgatgggctgcctggctctggggggtggaggggagcaccctgagatgcaccgcgcaggcccaccccctctccgagcagccccacttctgcccccaggagctcgggggctcccccctcctcctccccccctgcccccacctcttcctcctcgccttcgggaggaggcagaagagcaggagagcacctgccccatctgtctgggggagatccagaatg

SEQ ID NO: 283 - DNA, 499 bp, Homo sapiens
  source 1..499: mol_type = other DNA
gtgtgtttccctaatagcggggcagctggcgagggacgcagtaaaaaggagcgaggtgcaggtggggccccgctgcgccgaaatgactgaggatgaggtcagacgtggagggtgggaatgcagaaaccgagctctcccgcctgtccccaccggcgcacgctccccagctctccgtctctcaaatgatttgaatgtgttgggggaagtggcaggctgcggtgagagctgagaagaaaggggcttcctcttggagggaggcgctggccctggcatccttttttgggagtgttcaaaggattttgaacgctggaaaaggaatcgtaggctttactgcatcacgatttagaaacacatcctatatttggccgtaatgtaggctgcccttgttttgtggtgtctaaagtgcttgctctacatgttgcaaacgtgggattcagagtgcgaagcaaattgcaagttgttcatttcccccggcatggtaagatacaaaggcttttcc

SEQ ID NO: 284 - DNA, 499 bp, Homo sapiens
  source 1..499: mol_type = other DNA
acaggagccggcggggcgaggggcagggctaggtggaggggacagtgctgggtgggcgcgcggggcgcgggttcacgggctgggttgcaaggggttagggccgggggctgctgtcgggggctcggggaaagggagttggggaccgaaccaggtggcgtggggagcgtgaagcagggtccctgtggggaggaggctttcgaggtccggaacgctcctggccgggtgcggagccgcgggccgaggtgggacgaggctgcccagggaaggcttttaggggtcagggatcgcctgcttgggcgaggtgctgggagggaagggctgcttcgggcgaggcgtagagcccgggggctccaggcctggggactgggtttgggccgccccagggaacgagtgggtgggggcgggtaggggccgggctcacgtggggccggggcgagctgggccctgcgtcgggaggggcgagggcggccgcctggcctgcgggtttcctggctttggg

SEQ ID NO: 285 - DNA, 499 bp, Homo sapiens
  source 1..499: mol_type = other DNA
gtacttttatgttgattaccagtgagggtggaaacttcatagtggtttttagttttacagatgttttgtccactgagatctgcattgaaacaattaatataggtcatacaacaaatacctgctgaaactagtctttataaagaagaatcttacttaacaattttaaagtgtgctaatttcataaccttgtgttactttgagattacaaactatgtcccgataactctgtgtcctggtaacggttccttttctttgcaataattttaatttttgttgcaagataaatcaagcttcttttggtaatcattttaatttcatacattttgtttgtttgattaattttcatttacaaagtctgcagtggcaaaactattttgttttatcctattagctatttaatggtttctttgataatattaaagaatagtcatgcctttaaaagcagttaaagggcatgtacatttatgcatgcaatatctgtaaaggaaaacattttgta

SEQ ID NO: 286 - DNA, 499 bp, Homo sapiens
  source 1..499: mol_type = other DNA
ttaaaggactctatcatctatgtctatcccgatttgtcaaagtgtggaatttgggcgggaacatgtttcaaagtatgacacgtgttatgtaacactatttccccataactttgtcatcagcaggaaaccagaggattctgtcctagtaaggatccctactaatttgaaatgattgtgtggtcattcatacagttatatctttagactgctaatagtcttgagtcttggagataatccacagtactttatagaattaggtcatcaatcattataaagtaccatgtcttactaatgttctttctggtacattcagattgaacagctcattcattattagtaccaaacatttcaacctgttgtagacatatacccttttatgagtttggggtggtggttgttgttgttgttcttcttcttcttttaaatatagaaatctattatttttacctttttctcaaagcaagattcccatactaactatgtacttcaatccatatca

SEQ ID NO: 287 - DNA, 499 bp, Homo sapiens
  source 1..499: mol_type = other DNA
gggtcgtcctagtccccccgcacggtattgggagtggaggcagccccacacggaggcgctgggagactttcctcccagcagtgtcctgtcactgcattccggcccctgcgtttgtaggcagtgatgtcacagagtgccttcatgctcctcgggtctccggttctccccggacctctgtagtcctcattgccaaagttgtaccccctggggagtgcaccctgcctgcatttctggaggttcgggcggttccggggctctgcaggagcctccaggcgtgataaagagcgctgccggcactcccggggtctcggcctctttggggcccattgccaagccccttccctcctcgtgctcccgctccgcgttgcagcgtccccttcgccgccaggggccgcccggaagcggggctcccccagggcggggcggggcaaggggcggggcgcggcggtacctgggccgccagggagccgggggtgggctctccggggacagccggcag

SEQ ID NO: 288 - DNA, 499 bp, Homo sapiens
  source 1..499: mol_type = other DNA
taagggccgcgcctcccgtcagcgctcccgggaaaggcgctcgggaccctgccggccgcggttgcgcgtccacagcctcctcccgcggcccgtggtcccccacggatcacgcctcggctcacctcgtcctccccgggccggcgcccttgccggcactcctcctccccgtgcctgattcagcaccccgtgcgctgtccacgctccgggcctcttggggcaaggccctccccgctagcctccctcatacccgccagaacccgccagtcctggaagagagcgacctctacgaccgtcctggagatttgcgggggtcaaggaggggcgctccgagcaggtggcgccaaacccactcctctggcctctggccagtaccgccagggagggactcaggagagcaagcggtttggagtctgggggtcaagagaggggacctcagagaacacagaattacttgagggcgagggacactggccactgcctatcatgtccctgaaggcct

SEQ ID NO: 289 - DNA, 499 bp, Homo sapiens
  source 1..499: mol_type = other DNA
gtgagcgcggagtgaacgaagttggcgcagctctggggctgctggggcccgcgcgcgggcgtgggggcagtgggtcacgtggacgccccatctgggagcccccaagggctggccctggaaggccctcgatgcagaagccgggaggggctcccctcaagcttcctggggctgcggccgcagccgggcgctcccaggaaactcctccagaagttgtcaggcagcttcgggctgagcccaggggaccgagggagccatggggagtgggcacaacattgagggattcgtaggtgccgggctttgtgacctcactggggcccttcttctctgacacttggtcggaaacagacttcccaaaaggcggttgtgttgcggggcgggatggggggaaggactcgacggggagaggagtggccccgttggtcaccggtgccacgctggctctcctgctcgagttttgggccttgtttgcaaacgttgacctcgtaaccccccaaatcgg

SEQ ID NO: 290 - DNA, 499 bp, Homo sapiens
  source 1..499: mol_type = other DNA
acttggccgcgcacatgcccgccgccgccctcaacgccggtgagtgagccgcgtgcgacgcgccccaagcgccgccaagttgggggtccgcgcgcccggccccggcccggggatgcccggggcgcccgcggaggccgggggcggggggctcagggtcccggcccggggcagcgctgccgccgccatgattcccgagcccgcgccgcgaaagttctctggtgcgccccgcacgccgagggcctcggctgggggtgcggggcgggcggcccggggtgacccccgcgccggcggctgcggatcgcagggagcgcggcgggcgagggcgagggcgggggaggcttgttctcggctcctttttcctccggcttctgggcggctcggcgagggcccctgccggcgggagtcgggagcggcccgggccgcgccgggagcggggcgcggggccccgccgccctggggagcggggtcgtgaagcagcccgggcggggggcgctgcggg

SEQ ID NO: 291 - DNA, 499 bp, Homo sapiens
  source 1..499: mol_type = other DNA
gtgagtttgacttttttagattccacatataagtgagatcacgcagtattagcctttctgtgtctggcttatttcactttgcacaatgtcctccaggttcatccatgttgttgcaaatggcaggatttccttcttttttatggctgtgtgatattccattgtgtgtgtatgtatacacatacatagtatatacatatagacatacattataatcatattaaatataaatatacacaaaaacattttcattagaggcaactcttttaaagagagtttttacatggcttaaaactaaccacgagatagcctgttaatcacattacatgactgagagctaaggaacattctttgagcttttaatttatatctttttgataactaaaattttgaacatcagtacatatttttaaagaaatagttacactttgcttcattctgtgacaaatttgcatataaattaaaacaatacaaatcctcttaagtagcaaaatagaaaatt

SEQ ID NO: 292 - DNA, 499 bp, Homo sapiens
  source 1..499: mol_type = other DNA
aaagagaatacacgttttggtcttttttgtaattcacagtgctggcctaattgttattattctgtgcagcatttgtgctgtcctgattccacctctagaaattttttcctataggaaaaaaaaaatcacaattggattaactttttttccccagctttattgaggtacagttgacaaaattgtgtattttgaaggtttcacaatgtgatgatatgataaaagatatacattgtgtaaagattaccacagtcactctaattaacacatccacccccacacagttaccttttttttttttggagagagtgtgtgcatgtatgtgtgtgtgtgtgtgtgtgtgtgtgtgtgtgctgagggcatgtaaaatgttttttagcaaatttcaagtaaacaataacaatattactgtagtcaccatattgtacattagatctcagacttactcattttgtaaccaaaagtttgtacctttttactaacatttccccattgaccccca

SEQ ID NO: 293 - DNA, 499 bp, Homo sapiens
  source 1..499: mol_type = other DNA
ggtcatcactgagcctcttgaatcatttcacatcattttatataccaaaaatccactgagataattggttgaaaaagataaaattgctcttttttacaagttctttttgtttgttttattctttataaaagtgcttcctgttacaattctttagctatgtactgaagaacaactaggatgtgatagcttccactcctgtcctcctcctcctccactgtaaccttgggcactagtggagcattattgttttgttagcctgcctttacaataattttcctcccctttctgaaaagcttcaatgctaaacaacaatgtagagcattctttcttgcaatagacgctaattgtgttcctagttgggatcttgctgtcatagccacaataactgtgtcaattgtgcagggaggctgggtcacagtggttattgtgcagagtgatgaatgctgcttacttgtgatgtgctgccgcccgcatctgtgggtgagaacacgcagttact

SEQ ID NO: 294 - DNA, 499 bp, Homo sapiens
  source 1..499: mol_type = other DNA
taagttacgggttggataagtgacatatacgactggtgtcaattggcaaccaggcttcacagtttcatgaaatgtgtggattctgaaagtgttgtcattgcgaatgtggtttccttgcctagttcttccacatacttaaggaaaagatatttttaatgtaattgttagaatgtgttggtacgtaatgattctgaagtaaaaggaatttttttttttttttttttaagtaaacttggtgttttgcaaggatctgaagaatcccagtttggagctgattattttcttgactgtccacatcccacagttttttttttttctctccatcccactgcccattttaaagcacttttcagctgtctgattgctcattagcattgctcattaaaagtggtctgggggcatgcatttcaaagcagtccttttaatacttggtttttcaagttttgtcaaattcccagtgaatacaaaccaagttatttcttgaagtttagccttgttt

SEQ ID NO: 295 - DNA, 499 bp, Homo sapiens
  source 1..499: mol_type = other DNA
atcttatttctagatttttttttttcctaagcaatctcttgaaaaggaatatcagtgagcagatttctctggggccatttgaacttcattaaaatttcagagagggcttttcaatgagaatatattcatgtaagcactggagagttttgcataattttaaagttgaacagaattgggtacaattagtgatgaaaatacagtccatcccagattcctagctgattgccattttggttttcccagcaaacaccctttctaccccacttcctagctttattgagatatatctggtatataaaaaattgtacataactaatgtatacaatttggtgagtttggatataagtataggctggtgttaccatcacccagtcaaggtaataaacatatccatcacttccaaaactttgctgtgtctctttattgttactgttttttaaaaaacaacaacaaaaagcgccttttcaagggagtagcatttgctctcctctcttcccag

SEQ ID NO: 296 - DNA, 499 bp, Homo sapiens
  source 1..499: mol_type = other DNA
acatgtttgtcttaccagcttattgataagcactttgtgggatgtttatgtgagaacagttgattttaatgagaaaacagattttcagctcccatgttcagtgttttatgtgacaaaatcatacactgcagcaactaagtaatacgaagtgagtactttaattgaaacaattagagtgacacaggaggcattttctacttgtgtaaacgcaaagcttaatttttaaaaagcctcccccagttttccttcctaaaggaagtggatgatcaagcctgagctagatagaatagcagatgtgtatttcattattaatacaagaggaatctttttgggttaatagaactattctttagaagaagaacttgttttgtgttacaaaggtgttacatggttacttacagtaacaatttcgagcagcacagaaaatgcagaaatgtatcccattcttaggatttttgagataaattcttttttttatttggagagggagtctcactct

SEQ ID NO: 297 - DNA, 499 bp, Homo sapiens
  source 1..499: mol_type = other DNA
gtaagggagagggcatgaaagcagcgaggatagtagctgctgaaaacggggtatgtttcattatagctaaaaaaggatgcgctgcttcccccgcatccccgaaagctgctcatcctagcagcttgtgttagaggaggtggaggtgcaggttcaaggccgcgtgtagggggagtcaggtgggaggtacccacccgggcattctgtggcattcccaaaagtgactggtgatactcagcctggggtattgataagcttgaaaataggaagaggaggatgttgtagggctgctcacgagctccaaaaacagtcttcacttgaaaaaattatcctgggctttgattgtgggtcattgactatcttggtaaacccaggagtcttggactgtgttttttaaaacctgtaaacacacagccaggcttcctcctaagtatgaccgtcataagacatttgaaatgtagtgccgtgactgaaaacaattgagcaattgttcaggaaaaaa

SEQ ID NO: 298 - DNA, 499 bp, Homo sapiens
  source 1..499: mol_type = other DNA
ttccgtgcacacatgttgagctagagatgtctgggtagaaagagagaatgcttgggaagcagctggtctggggggttcctgttcagaaggaaggcctgagctagcgctttgaaagctgtcatgtacgtgagtctttaacacagcctttccttcaaggtggcaattgatcagaatccattggggtgttttaaaaacatggattattcacctcctcttctgaactcccatatatttctgcaagaatgtcagatgtcctaggtggttctgttcgggcaggtttgggaaacaagggccccagaccctgaaactaccgggcacccctggggagaaggagtagaggcccaggctgggacctagagtaagggccagccaaggtggagtctgcgtgaagatccttctggaactagagggactggaagaagccagcgggagtggggctgtggatgctaaaggactggaaagttacccagaggagggggagggcgtggttgacaaggct

SEQ ID NO: 299 - DNA, 499 bp, Homo sapiens
  source 1..499: mol_type = other DNA
gtcactttgtaggtcaccacctagaggggaggaagacctcgctttggagagtgggaataaaacgctcgtggaaaagggtacacgtgagtgtctcattacacgaaaaacctcaggaagtaggatggacgtctttctggctgacctgaaacagaaagtgtaaaccaggcaagccataggtgggagctggagttctttttctaagagggctcttttccttctctctccttttctcaattaggcttttctgggaaagtgaggccaccatggctctggagaagtctcttgtccggctccttctgcttgtcctgatactgctggtgctgggctgggtccagccttccctgggcaaggaatcccgggccaagaaattccagcggcagcatatggactcagacagttcccccagcagcagctccacctactgtaaccaaatgatgaggcgccggaatatgacacaggggcggtgcaaaccagtgaacacctttgtgcacgagcccct

SEQ ID NO: 300 - DNA, 499 bp, Homo sapiens
  source 1..499: mol_type = other DNA
aagccaaacccctttgtaatctgtataaggtccacaccccgggagctgagtgattgcagaaactggccttccatctctctcagacaccaagctgcagatccaggtaagcagcccaagaggtgttctcaggtgccgcttctgcttcagggttgcagaagagggagctagggccagtccacagcactgagaaagattgggtgatgctagcgctgaaaaaatgtggcccaggcaaacatcagctgggggcagaggggtcagggtggaacgtgcaggctgcagagcatccatgggactggagaagaaggagcctccaaattgggggaggccagcgtttctctctggaatacaatggaatcttttatgatgccagtgtcaggcactggcctgagttcccttatgctccaagacaacaaggctctgtcacccatggccctggatgtcggggatacaatttggttcatgatttattcaaactgatgtttcgatgagccatttgagc

SEQ ID NO: 301 - DNA, 499 bp, Homo sapiens
  source 1..499: mol_type = other DNA
gtcgtggatggggcggtgctgagggcagccgagggatccctctcagggctgagggatccccgcactccccacaccgccccaatgcggggagggggtggtggaatgttttggtgagccgagcagagcctggaagcgtccagccgcccgcccctcgccccccggccccagcacaaccctttcctgagcggcagtctgggcggggtgaaagggggggcgtgtttactgggggtctggggcgggtctgcggggagcctagcgcccgtgggcgggctggggcgggccgggggcgggtctgcgggaagcccgagccggggcgggcccgagtcaaaggcaagtgaaggtggaagcggccgcggcggcagcaggtagggggaggggcaggcgaggggccgtagggcctggaaggcgccagccgggccggcgggcggtgtgattgatccgcgtcccctggagctggaggctcgggggaaagggccagcacggagcgggcgctcggttg

SEQ ID NO: 302 - DNA, 499 bp, Homo sapiens
  source 1..499: mol_type = other DNA
gtgtgtgtgtaaagtctacagtggcaaacccactcgggcaccgagagggacgcggcagaccctgagaccatcccccgggcattgcgattcagcgggcctgagctggtctcctattctgggccggactgggaggggttagcggcgaagccacagggtctcttgggtcccagcccaggacactgcgtcctccccaagcccctactccacccccgcagggttaactccgcccctgcgcctgtttacccaggagtcagagcctctgggggtccccggcccctcccccgcgccccttgaggcattgaccccagagtccctgttggccatcctctccccaccccccgcctgcccgcgatcgccctctatttatagcggccccccgcattccccgcccccacctccccgccttgttgtccaacttctcccggagcagccggagagcaggcgtcgggacgcagcaaagagaggagaggtaccaggactctgggcacgagggagtcgg

SEQ ID NO: 303 - DNA, 499 bp, Homo sapiens
  source 1..499: mol_type = other DNA
cagatacctcggattgaggatggtaacaattttggagtggctgtccaggtgagagcgctgccccacttccctgctcttttctagtccatgcttccttccactttcccccttgctttttttccctaggagaaggtgtttgagctgatgaccagcctccacaccaagctagaaggcttccacactcaaatctctaagtgagtgaccacccatgtgcacactgtttttgttttgggagacctccttcttctactccatacacacttctccttccacaggtatttctctgagcgtggtgatgcagtgactaaagcagccaagcagccccatgtggtaggtgaggcccaggtcagggtgcatgggggaaggacacatgtaaggtcaggcctgacccgagcttcccacagggtgattatcggcagctggtgcacgagctggatgaggcagagtaccgggacatccggctgatggtcatggagatccgcaatgcttatgtgaggag

SEQ ID NO: 304 - DNA, 499 bp, Homo sapiens
  source 1..499: mol_type = other DNA
ctgtgttatatgacatcatcctgaagaacttcgagaagctcaagaagcccaggggagaaacaaagggaatgatctattgagagccctctctcccattctgtgatgagtacagcagagaccttcctgctttttactggggactccagattttccccaaacttgcttctgttgagatttttccctcaccttgcctctcaggcacaataaatatagttataccactgcccatcagcccaagtctctttattggaaccgggccccgctggccctggctcaggcatttccatttccattagtgggaccaacccactgggtgatttgagtgttgagccgctggttggtccagtcctgccggatgtcatcaaggtggcagtcaaagtccacaaggtgctggtgggcccgatcttccagtagagctcccaccatctgccgtgactcttcccagtccctccacatcactctgaaatagtaacccccatggaggtcaaacagcaagtag

SEQ ID NO: 305 - DNA, 499 bp, Homo sapiens
  source 1..499: mol_type = other DNA
ccagagtcctgccttttctgtctccatttccctattctctgtccctggcacttgagcacccagtggcttccttgaacctggccctgtggcatgcctctgggatccactctcctggatccacttgcctttttcagaaatattattgaatcccctccccttgctcttcctctctggacagggtgaacgggagctcccagaggtcagccgccgagaactggacctgctgatcgcagaggaagaagctatcttgttagaaagtaggtgtctccggcagcgtagggcccgcctggagctggatagtcagacccctggcgtgggcattctgggactgggcaatgctcccatttctctttttctgtcctctgaactctgattctctctccacagtcccgcggctcccacctccagctcctgcagagtaagggcaagaactcctagaccaggtagggtgtcagtgctgggaagggtctcctcatttctcttgcccatttcccctcag

SEQ ID NO: 306 - DNA, 499 bp, Homo sapiens
  source 1..499: mol_type = other DNA
tgagtgcccaccatgccccaggggcttttctgggagtacctggatactgctgcagacaagggctttatatcccaacttgctaaagggaggaccctgcagtttcttgccctggcatctgcaaggggtaaggggcttatgggacagagccccttgggtgttgttgcagaggtgacccccccggaggagctgcgtctgccagccccacccagcccagaggtgagtagcctcccttctaatcctcctcctcctcctctttgccctcccccacaaggactgcctccccaagcccagggccactgctagcttacaggggtccttaatgcagatgataaaagatgcccctttctacgccccatcgtatctggcctacgcttcccagatgggtacccttatgcaaggtatgagctgctcaagtgcatggagaccccgcacaagccctctccaggttcctctaggggcgggtgtggggtcctgttagcagtccaccagaatgacagga

SEQ ID NO: 307 - DNA, 499 bp, Homo sapiens
  source 1..499: mol_type = other DNA
gtggcgggacaggcttcattgggacagccctaacccagctgctgaatgccagaggccacgaagtgacgttggtctcccgaaagcccgggcccggccggatcacgtgggtaagtccatcctctggaagcgggtgggagggcagagttgggcggcgcagggcggggcaggggcactgtgtgctttctccgacaggatgagctcgctgcatcggggctgccgagctgcgatgccgccgtcaacctggccggagagaacatcctcaaccctctccgaaggtcagcccgggccctaaagctgatacccactagagcacagggaggacagtgccccactgatgagaacctgtgagctatgggtaatggagctcccagattccgaactaaaccgatatcccagactactcattctgctccactcctccacccccacctgctcctccacccagtcagccaattggcttaagtcctcacgtataactcaggatgcccaggaaatgaat

SEQ ID NO: 308 - DNA, 499 bp, Homo sapiens
  source 1..499: mol_type = other DNA
cttgctattgaaacacccagcctatatttacaagtttttccgggtcgccgagaagggtcacgcacaggattgcgacctcgattggaacgcgcttcccgaaaggggcatgcgcagagaggtcgtagtcgcgtctgaggtgaggtaaactctaaactttacgcaggcgcgttaggtcctagtcgctatgcgtgtgcttgtgggtgagggagggcagaaagggagagtgctgggcgggcttagtcggagattgaggactgggaatccgcttccgggagggcactgtctagtgcacaggcaacctggccttggcctcctagcccgagaagccgaatctccctaatccctgtgacctgtgtcacctctgcatcgcgaggagggggataagtggggagaagcctggtgtcagatgggatggcgccggaagagggtgccacagcggggacggaaggcgcccccaccccaactccacgggaatataaacaatttgtattttccgatc

SEQ ID NO: 309 - DNA, 499 bp, Homo sapiens
  source 1..499: mol_type = other DNA
gtatagttgcttaagctgttcacttcacagtcttgactgttattttccctaaaggtgtaatactgtaaactgctacatcaagaagaataaaaagcaagtgctaattatattctagagtcagaagacctccagttgtatggcaccatgaaccagtctaatcccttcattgtaccaatgatgaaaatgtggctgagacatttgtccagggttgcccagtgagtcactggcagagctggaatcaaacccaggtcacatagcttctagctctatagtctttacaacacaccagattgtctccttaaaccatttttagttcctccgacaatttcccaaaattaatattaagataaaaaatctagatagggaatgtgaaaaccatatatacttttgcattgaaggaaactctagattctactaatattaatagtaagccctccaagtgtgcttatgtagttacagctctgaggctagaggtatgcccagcctctcacttgatgag

SEQ ID NO: 310 - DNA, 499 bp, Homo sapiens
  source 1..499: mol_type = other DNA
tatggcccaggtcacttgagttttcaatgctctttctataaacctggaagtaaattctagaatttaaacatgaattcttagagatctgatgaggaacagttggcagctaggattttgagctatctcaactacttaaaaaaagataatttatctccatgaagtcatgtgtggagaattcagcaaatgagctgatttggcactaattttttttctctggtcccagctggtttctctgaattttcagcccacccatgctgtgtcttaggtagccagaaacagtcacaatgctccactgagaaccatgctttctgtgttctcagtgcatggaagcaggtgtgtacggtgccctgtggccctcactggctggcataaccccccagagatgactcctgctctcaccctcagagtgagagtaggaacgcttagctgttactggggttcggcagcctgtctcatgattccctctgacggaattttctgtgggaatggtttgttgaca

SEQ ID NO: 311 - DNA, 499 bp, Homo sapiens
  source 1..499: mol_type = other DNA
atagatattataaaaagtaaatcagtgaagtacaagcactgtagttcagaagagaaacagatcgtgtagtttttagtctttaagattatatactctaaatctttgaagtctcacagggctggtacattgtcttgtactgtgataggagcccaataaagtaatactcagtggatgtacttggtttgggtcttgaaggatagttatagtgttacaagttagccagggggagataggattaccaacatatggaggggagagaacaacatatgcaaagagggtaacccgcaggacagataaagataattcaattagttgtactagagagtaactaggggctagcagtgggaaataaggcaggaagggtaggtgagggcaactcaacacattttactaaattgtgaaagaccagtaagttgggattttatttggaaatcttcagtataccgggaaacacactggattgtaatttgtctttttcttcattgtgatctgctcacag

SEQ ID NO: 312 - DNA, 499 bp, Homo sapiens
  source 1..499: mol_type = other DNA
tacattatggctttatagtcagtaccatagctgcttcctaaatcttaagcctttaaggaaatgcaaagtagttcctgtccacaagaaatctggtgaccctgtctttctacagtctaagatagagaatccaaaatatagtaactacttttaatgttttcttctgccacacaggtcagctgaaagaacactttgcacagttcggccatgtcagaaggtgcattttaccttttgtaagtattaaggaaaagtaggtgggaggtggggatggctaatgggtacaaaaaaaatagaatgaataagacctatttgatagtacaacagggtgactatggtcaataataattgtacattttaaaataactcagagtgtaattggattatttgtaactcaaaggataaatgcctgaggggatggataccccataagtcaaaggataaatgcttgaggggatagataccccatgctccatgatgtgcttaatttacattgcatgcctat

SEQ ID NO: 313 - DNA, 499 bp, Homo sapiens
  source 1..499: mol_type = other DNA
gtaagtggactaaggtttaaaattactatcctaaacatttctagctaatgttaaccatccatccaaccaaccggtggttggagtcacagaaagctaaaacaatgtcactctctttattgtttattccctgcctacccatccactgcattgacatctactgagggtccactacaggcccaggcaatgtccaagagagtcccaggtccctgcctggagtgcatgtgacaatcatcataatacagggctatagcgcatatatgacaaagtgctgtgggagaaaagagaaagacaatccaatcccttgggctcccagaagaggtggcttgtgagctgcgccttgagcacccactcacggaggacagcataagcaaaagtggggaggaatgtgggcaggaggggcgtgaagaagcgggcagtggggtttggagtgactgaaccctaggagggtggtggtggcaagagatgatgggggagtgttggaggggcctgggcaggctat

SEQ ID NO: 314 - DNA, 499 bp, Homo sapiens
  source 1..499: mol_type = other DNA
ttgatgcatttagcttactttcctaaggggctttcaagggggacacttcccctggattcaattttccccttagccactaactttgaaacccaaccagaattccagacccttcagtgcagctctcctgcagttggttgagtcattaggataagtctgaatggagcctggaataataacaactaagttctagtttttgctgcaggccctctagcccagtccaagagcacctggccacccagagaagcactgctggagtgggggatcaggccatacagcatccacagagaagcccagctccttactgggaccctggtccatttcccaagttgaacttcctgcaggaagagaacatatcacatattttaatccatttgacagtcacagaggaagtctaaggaagccagggcatgcctgcttggggctgtccaagttcatcctctgccgccctatctctgttatgtttggtttggaagtccagaagattgtgtttatgttccca

SEQ ID NO: 315 - DNA, 499 bp, Homo sapiens
  source 1..499: mol_type = other DNA
gtcccagcttccttgagtggagtggttctggtcagagggctctaagctggtgcagccttgtggttgggctggtgtcctggaggctggccctggccatgcccagagggttgtaccagggccacggagagccagtattcacagccctctacctagtaggccacctgggggatcccatctcactgccaggagcagcacccttgggcctctcagagtgggcttcgccctagccagatgcccctccccgatatctgccagacaaagggggctgggccacttgctgagaaagggagctgggagagccactggtcctcggccacctgaggggcttggccagattctgccgggcagggtgggcccagcctgcatgctccctccccccagggcctgcagcttgtccccttcccttcagaattccggctctgctgggcccttcctgcccctccccacctcttcctgcctggctccctagggaggcccctgcttccatccactgggaagc

SEQ ID NO: 316 - DNA, 499 bp, Homo sapiens
  source 1..499: mol_type = other DNA
tgtgtgagtgtaagagaagtgtttgagggaatgacaggtgggggagatgcatatgtgtggggggaggcaggtgtgtggggggaagcgggtgtgtgtctgaggaagcgggtgtgtgtggggggaagcgggtgtgtggaggcgggcgtgtgggggaggcgggtgtgtgtgtgagaggaaggtgtgtgggaggaggcagatttgtggggggaggcgggcgtgtgggggaggcgggtgtgaggcgggtgtccgggaggcaggtgttggagcgcgggcaggtgttggagcgcgggcaggtgttggagcgcgggcaggtgttggagcgcgggcaggtgttggagcgcgggcaggctcgagcacaggccccttcaccgcaggcactgaggggactaacagggcagccccgggccccttctcaaaggcggctctagcggggttccagggctgggggcgctgagacccagagggagaacagggcctgggggcgacgggctcctccggg

SEQ ID NO: 317 - DNA, 499 bp, Homo sapiens
  source 1..499: mol_type = other DNA
agggagaggatgggataagcctgaaggggaaggtacccaagatagtctttgaggggtcatggatttagattgggaagagttattgtccctcctcattggtcctcattatgtcttcttaatgaaagctgctcattttcttcgtgagagcaaacaacctgatcttctgaccatttgtcttggtcacctgggctacccaaactgagtgagaagtcaggaatgagccggtaggttcctggggagaggcgtgtgtcctcgtgagttgccggtgcctcccttgactgcttttcccggagctctgtgtgccctcgttctccttggtgtggatgcgtgttgttctgatgatgagttagcgggggtggggatggcgcactgtttgaacagatgtgccctcacatggctgcgggaggacgtggtgggaggtgctgtggtgaagtggccccacacatggctgggctttgtggggttttgactctgtccttcccaatgttcctccccacag

SEQ ID NO: 318 - DNA, 499 bp, Homo sapiens
  source 1..499: mol_type = other DNA
taggaccctggctgtcctggggaagggagcagaggggcccgagagcaagggacctcagggtacaggccttgcagatgctgaagcgaggcggtggggggtgctgggtgcctcacagttctaatggtggctgagctcttcattggtccagttgggagacatgttgcgtggatgctccggccactcttaagctcaccgctcagactcaggactaaagccggttgagggctgagtggcaactcgtgtctcgcagaagacacccctcctcccaccctagaagagaggttcgatttcttgcccactgccctggtctgctcatggtggggcagtatgtgtgggagagcccctcaatcctcaggggtgtactcagaccagcagggcagtggcaaagacgtgggggtgctggtgctcacccactgctgcggccagtgttgggtggcctggtggctggggtcggggccagagtgcatttcacaatggacgggtctctgaaagcccgggg

SEQ ID NO: 319 - DNA, 499 bp, Homo sapiens
  source 1..499: mol_type = other DNA
aatgtttccctgccaccactcccaaccttcctgagcttcttgatttgtgtcttcctgactccctcctgttagacttttattcccagagactgggaaaacccaagatgccactatctctttctcaaaatgtaagcaagtttggtttatttgttttagtaagagagggagagagtgatgaagttaggagtaatgcagaactttcagggagctacaaggaggataaaaattatgagtgagaaccgccattccagcctagctttctcaagaatgcaaacagagggaattggatacctgcaactgttttgtttaatacctttctgcaatgatgctctgcctagcatggaaacttaagacaaaagcaacctcctaaggattctttgttacaacccctttctgggtggtcctcgaaccacaacctggagtggttgcatcattataattgtattatcacaattgccgattgtagcctatcagtatacatttggtcttttatctgcag

SEQ ID NO: 320 - DNA, 499 bp, Homo sapiens
  source 1..499: mol_type = other DNA
tatttactgtgttctgatggtttgaagtttccgttagcattttaaataatatatttgcacacttctcacaacaaccttataagtagatgcctttattatcctatttttttcagaggaggaagctaatttttaagagactctactttctcatggttttccctttcttcttctacacagtgtctacatacttacatatacacacccacatgagactataagtcctgtgagagcagggaccttatctatctaattcatagctgtagccctagcacctagcacaatgtctggtacataataggtgctcaattaatgtttgttgaatgaatgaaggagcatctagtgttatcactaaagaaagattagaacccagacatgatgttttctcctcactgctgatcttcaggaaattgtgtcatcagatagctgccttttgagtcaatgccagccagtacttgtaaaagagcttcaaaatgtagaacctacaggatctgacttgatt

SEQ ID NO: 321 - DNA, 499 bp, Homo sapiens
  source 1..499: mol_type = other DNA
gtgagaaacaaagctttttttttttttttccccaaaaggagcctactgcctttcacctcttggtgcaattctcatgtggaaaaagatgcagagctccttttcttgttctctaggcagaggaaagtagagtagaaaaataaccattcgtgtattatgaaccctgaagttggggagaagtattttaaagataaggatattgtcttccggaggcttttgagatactatctggggtggagaagaggatgcttatatggataataggtatgacctcttttttccttctttttcaggtgagctccaaggaagtgaataagtttcagatggtgagttttgggtgttccttatgtttcccttctcagggcaagagtcagtatgatagtgaacactgggtaagattgatacttgggttcactgctctccggagataagttttaccagtatgtttcaagtaaaagctgccagggtgtgaatttcaatgctaataccgtcttcctttcta

SEQ ID NO: 322 - DNA, 499 bp, Homo sapiens
  source 1..499: mol_type = other DNA
ctagtctttcagtggaggttgaataaggcaaaggaagaggctccttgaattgagtgaatactactttattctgctgtggcagaaatcacattagtgtaggatactgactgcatgaaaatgtagactatacttagttggaagtcttgagttatcttgagaggacttctacagtaaaacaagcttatgtggttttacagattaagttagatatcatgaaataacaaaaacctaaggacaagttatcttgagaggacttctacagtaaaacaagcttatgtggttttacagattaagttagatatcatgaaataacaaaaacctaaggagtgttcttcagaggtagaatttattttgtggtagctcgcattgtgcttaaatatgcttgaattaatggaaggcaggtttaaaaataagatggggagggagtagtttaaatatatcttctattaatgtataaaaaattaatactgagaagtcctctgacttttctcagaaccca

SEQ ID NO: 323 - DNA, 499 bp, Homo sapiens
  source 1..499: mol_type = other DNA
gtgggtcctggggggcttctggccagggtgacatgtcctcacccctccaggccctgtgggttgggttggaggagctgagaggtggggcaggatttggagaccccaggaagaatctcatttgggaagaaggaagagacaaaatgcacgttcctcccttccccacagctgtgggatggtgtcttctacagggaggcccctttctaatgtgttcctcaccatgctacaaaaatccaccattttaaattcactttggggagagctttgcttgacaagctccttcagcaatgcaaatactcctgagctgggggtgggacagacacagcaagtgtggaactccttggcgcagaggagcagatctgaccttgcatctggtgactgaaagagagtaagggcttcaaagtgctacaaggagagaaaaagagcccaaatgaggagaaagaacgcacttaattcttcctctatgttcagttctgcccagaatgggcacccaagggtgtgt

SEQ ID NO: 324 - DNA, 499 bp, Homo sapiens
  source 1..499: mol_type = other DNA
cctcaagtctgagtaatcctgacaacctgaggcgaggctggctctttcttgctgcctgcgagttcccaggctgtggggaaaaggagaaagggaggcaaggctgtgggtgccaggaggctatgggaacccagatgtggtgttgggaggtgctggtcactcttagtccttcatttcctttgttcctggtacctttgggccctggaggcttgtgagaggtcaaatgaaggggacccacgggctgacagtgcaagcccctgcatcctgctgcttgccacccaagcctccctccctctgaccaggccaacctggtgtggtcaacgttggctctgcccagcccttgagtgcctccccaaaagctgacctgcctctgcctctgcctctgcccctcctcatttctaggctgtcctgtgtcctggctctgggttttggtgtctcaacctctacctctttctgtctctgtcactgtctgtctctcttctcacttctgctgctggctcca

SEQ ID NO: 325 - DNA, 499 bp, Homo sapiens
  source 1..499: mol_type = other DNA
tcctagccaaggggttcccactgcgtttctgttgggttatcccaaacctgtgataggatagtagcgccctccctgcctccggtcgaataaacactacaacgtctgacactcggtgctgaaaggaaatcgggcgcggtgtcttgcccacagcttggggagcggccccgggcgcaataactgtcaccggcgccgagatgcggttccggcgcttagggcgccgctaaactcagagcccgggagtcatggctgcgggcggtgccgccccaggtaaatcagtccaggagcagggcccgggcctggcgtacactctcggaaaaatgggggccagagcaaacaagaagagcgaaagcaagagggctaggcagccagaggcggcagcaagactcaagacgccaacggcgccgtcttcctggggccccagggcctgcgccatccctgggctgccggggcaccgcctctccacgcccctcgtccggcggcggctgcgactgcttccgag

SEQ ID NO: 326 - DNA, 499 bp, Homo sapiens
  source 1..499: mol_type = other DNA
tgccgaggacccaaccagcccaaactctgggggaaatgactcccctctgccctcgccccgcgctctgctaccatttccttacgtctctgcttcgctcagcgatgcaaaacgcgcgaggcgcacggcagagggccgaagccgcggtactctccgggccaggcccgcccctcggccgcgccgcgcagcacgggattccccggccgctgtccagcgctggccgcctgagccaaggctgccgcggagccagtacagtcggggccgctggctggaagggcgagcttcctaaggcggggggaagcccggcgccggggccgggtaggaaaggcgggggaggggctccggccgtctggaaggaatccacgcggcttgaggctgtgggggaagtagggtggcgagcggtccttctgcgcgcggggggcggggggggtggggtggtccattagggtcccctggcgagggggcggctttctagtgtgtgagggcgacgccctagaagctc

SEQ ID NO: 327 - DNA, 499 bp, Homo sapiens
  source 1..499: mol_type = other DNA
gtgagtctccagcgggaggtgggggcggcacagggcttaaccggggcatcctcctgtaaacccatcctggggctacacgactgcagcccaggaacatttctttctttctttctttctttttttttttctcagcaaacttttaagaactgtgagcagaggccagtaattttggagacaggacctcggcctgaaagtgatagatgtctttgttgttactgagtgtgggccaggtgtaaggtttgtaaacgggggatgaggaacagagcgggaccggagtgtctcatttttcctcttctcgttttcctggggagttataagttagacatttatgctgcttcctttgtctccacctacactggttcagctccttttggcacaaagattcaacaaattaaggagtaactttttttttttttttttttttgagacggagtctcgctccgtcgcccaggctggagtgcagtggcgccatcccagctcactgcaagctctgtctgct

SEQ ID NO: 328 - DNA, 499 bp, Homo sapiens
  source 1..499: mol_type = other DNA
tccccccgcgcccgtcgccgtggcgaccgccggggccacgcagcaccgccccttcctcgcgacgtggccccgccctctgagaacccggaagcgggagtctcgcgccagctgagcggcggtcgggcggggggagcgcggcggcccaagctcgctcggccacgcgccccgccccctcagaggccggcctcccgcacgcaccgcgcagcctgctgtgcccgtgggtcccgagtgctccgccgcccgccccgacccgggcccagccgcctccacggcccgcgctcgtactggagcgaagagcggcctcctgaaggaggggaagggacgtgggggcggccacggcaggtgagggtgggcgaagccctgggaagcggctgggtgtgcggtatgcggggttgtaggtgtgtgtgtgtggcgcgtggctgccttggttggtgtgactttgtgagtgtgttctgagtgggccggtccatgtgaccacgcacgtgatcacgtgcccttg

SEQ ID NO: 329 - DNA, 499 bp, Homo sapiens
  source 1..499: mol_type = other DNA
gtaagggcatcccttggcttcttaatctacgtactccagacccagggcttggacctttgctggtacgggttaaagtgaggccgacagtgaaggtccacgtggagagagacattgggaagttgtcaaaaaggcgtttagaatcaggtttgactcattaatttcctgagactctgaaggagttcagcctctacacctcagtttcccctgggaaaactgggagtaacattttcctcatgatggttgaaaggattcatgcttacgtggatgtggcacactcagtaagtgtctaatctctggcgaaatacccagaagaaaagcctgtgactgaatatattatttttgagcacaattacttagtccacaattgagcataagggccttgatccattgtcttcctactgtccccaaacgcctacagctaatcgtgaggaatcaggctctctgaataaccacgtgtctcctggaaaccagttccccaagggatctggtttaatattga

SEQ ID NO: 330 - DNA, 499 bp, Homo sapiens
  source 1..499: mol_type = other DNA
cggtgccgtcccctgtggccgggattagatgggcggcctgcgagggcctgggaatggctcggggcccgagagctcgaccggcccttgccgggtggccgccagggaccacgctccatctcgccgcggccgggctgcacgtagcggccgcgcccagggcccaccccgcttcaccgggcgatggccttgggcctcgtaacgggcgggataaacctctgcaggctttgctggggcctcctggccctcgcccgttccgcgcctctccggcacgtttctttcttttcctttcttttttctttcttttttttttttttaattatccggcacattttttaacaaatgcgtcctgattgtggaacgcggaggccgcggggtggggtggggatctggttacggagggggcaggaaatctgtcgcgttcactgaacgcaaacggtgtgggtcaagggctgtttgggggtcagagttagagaccaggatgactagacgagtcatagcccac

SEQ ID NO: 331 - DNA, 499 bp, Homo sapiens
  source 1..499: mol_type = other DNA
gtgagtccagcaccctacagtagtagtactgtagtcattagaggtggcccaatgacccttcccttctgcatcctttccctcttccccagtatgatcactcaccccaccccttgtcttcgtttttttttcaatcccatgacccttctggttgtagtgtatgaaaacatctgtggcaactttttttcttcttttctttgccgttctctctgcctcccttatcccccaacccttctctgtgtctttcttctcaggaacaaagaacttgaggaaatccgtgactgtccaaaatcatctgtgttgggaagagttggggagggagaactgggaagcttaaattaaaactcataaaaccaggcagtccaaggagggtagtgttgaaatggttttccctcccctttgattttgtagtaggtttcctgctatacttttgctgatttcttctctggtgcctttctatttttgtttctctccccagtctaactactttttatttcttctg

SEQ ID NO: 332 - DNA, 499 bp, Homo sapiens
  source 1..499: mol_type = other DNA
ttgttgaggcttgcaaaagacactgcatttctaacaaagcgtttgcccatccaaaagagagatcctgatttggcatataaaactactgcctcttctggttatctttcatcacttgcctgagtttaaaaaggtaataaatggtttgtgttctaaggaaagaggctcttcccaagacctgaggctttctcattcctaccagctgggcccattgctaaaatgctttccagtgggcttgcttctgcctggccagcacctgggctgccccagcttgtaattagcctgcctttgcttcataagcttcccagggtgtggttcttcttctaaaagcttgtatgaattgctgtactgtctctttatagtttaaaaatgaatccttttttgttctttgcaactcatttgcttttttcttttcttttctttaaattactattaacacctgttgattcttttttttttttctgattggcctgtcactgcattcctgctccccctccctcta

SEQ ID NO: 333 - DNA, 499 bp, Homo sapiens
  source 1..499: mol_type = other DNA
tacctgggtgctggttatgtgaggtgtacagttgatgaaaacttattaagctttataataggtacaattttctgtatgtgtagtagacgtcaatagtttttaaaatgtcttttgccacagcccgcagctgtgaataatgctattcgcttaacagtggaaaacgtgtcaatgacctgaaacaccctggctcccgggatcctacccccttaagttaaacaaatgaaataacttccactgtctttcctaatgtcttaattcggtcctcagttaaactggcggttggcgccagttttttccagggaaggattctgggagacggaggaggagacgccagcatttcgccccctgcacctccagcgggctgcggtccgctcccggcctcactcgagcaggccccgccctcccagaggcagttagtccaagtcacgtgatcgtcgactcagctgaccctgcgggaccggaaaaagaaattcccgggccctggcttcttggcgcgatg

SEQ ID NO: 334 - DNA, 499 bp, Homo sapiens
  source 1..499: mol_type = other DNA
tagggaaaagtccaccactctcccgctcccgagacgggggcgggggtacggggcgggtaagacagagcaggccggccggcttagagtcccggtgcttccctggcggaaggaagggcccctgcctcccggggcaggaactagggcttgtctggagctgggagtcctttcaggtcttccccatccccaagaggacctcccaaggatacccccttccccagccctgccgtggggcttgtacaagaaggtgcttagaatcaggctcactcttccacactgttaggaagcccctccgctctttccagagccagaaagtagtagttttggggttgagacttatccatccatccatccaatccatccatccgtacgttctaagcgcctggtctataccatgaagtgtgctaggcactgggaggacttgagctgccaagggaaggggaaatcggaggcttgaattggagtcatagctaaggctccaggggcagagacctaactgcgc

SEQ ID NO: 335 - DNA, 499 bp, Homo sapiens
  source 1..499: mol_type = other DNA
ctccgccttaacctcccacgaaatcaaatccccgctttaccaacccgcagcagccgggggcatggagagagaagcgggggtggggtggggtagggtagccggcccctcccccacccggggggggggggggggcgcctccaccgactccgaactaccagtcccggcgtgccctggggcggcgcgggcgcaggggcgcgtgcgcggcgggctgtcgttggctggagcagcggctgcgcgggtcgcggtgctgtgaggtctgcgggcgctggcaaatccggcccaggatgtagagctggcagtgcctgacggcgcgtctgacgcggagttgggtggggtagagagtagggggcggtagtcgggggtggtgggagaaggaggaggcggcgaatcacttataaatggcgccgaagcaggacccgaagcctaaattccaggagggtgagtgtgcgcctttgggaaaaaggcacctaacggcgcaggagatagaggcgggctcgag

SEQ ID NO: 336 - DNA, 499 bp, Homo sapiens
  source 1..499: mol_type = other DNA
tgcgtcattgtgagaaagcgctttgtgaagcgagagtgctgcgcaggcgttagagtgggagagagagcgtttggcgcgtggcacaccctcgtcaagtgtttgttattgttctgaggaagagggcgcggagagagcagcctattgtagggaggcgacgggagcgccatggcggcggttaggggaagtgatgtggcggcggggggggaggggcggtggctgtttcgggcggtcctgcggcgcgcccggccgcttgggcagctacgacgggtttttcggtgcttcctggagccccggggtggttgcgttcggtggcaactcagctgcggatgggggtgggtttggcgccacggggcgggagaagtgcgttgtaaaatggccgttgcaagatggcggcgccatcatggccgccggcgtctcggtcccgtatggaggcacagcttacgggcagatgcagcgcccccttccacgacgaccagaaggttgccggggccctccgcat

SEQ ID NO: 337 - DNA, 499 bp, Homo sapiens
  source 1..499: mol_type = other DNA
gctgctggctcacctttccttctaggggtttgtcaggaacaactcttgttgaatccccaaggtaaccatctctgggtcaggatgcctaggagtctgcaggcatctctgtggaagagacatctgggctggggtggcaaggcagagctggaagagcaccttggtcctttttatagcctctgcaaaaacaagtcctcttcaatggctggcagacccccttagttcttcttacggtcccttgggaaggaaggactcataacatggggacttccccaaacacaggtgctcagttcaacatatgtcaactactccagttagggggcctggaggccccacctggctggggtactgacccactggtcatcttagtggaagaatagaagatgcataactgtacttctcaaaccactttgtggcaagtcacctggggatcccatcacatgcagattctattagtaggtctagggtggggtctgaaattctgcattttttttttaagtga

SEQ ID NO: 338 - DNA, 499 bp, Homo sapiens
  source 1..499: mol_type = other DNA
gataaaggcctgggtgggaggggtagagaggctgacaaaggcttcctgagggagggcccagtctgagagggaagtaccttctccccaagactgatgatttaaattctgacctgccctttgcatgataccttcccagcctgggagaacttgttgctcagtaagcagacccaggtgctggcctctgtacccaccatggcctctgccctcatcacgacctctacccccaggaaagctgatgggcatgaatgagatcacagagaaactcatgctgccagacacctgtcggagtgaccacattgtggtgcagaaagtgactgccactgccaacctgggtcgtgttccttgtgggacatctgatgagtacaggtactaggccaccagtagaggggaaatgatgagcatgggggccctggtttgaaggaggagccccagctgctgatccccttccaaacacagtcacccttagcagctcttcctcaccccttctattcccacctca

SEQ ID NO: 339 - DNA, 499 bp, Homo sapiens
  source 1..499: mol_type = other DNA
gtgattatttaaactctccaatctctttgagtctttgtttttcctcaaattataaatgtacagattcatgtagaaacataagaaaatatcaataatcaaaaagcaaagtcacttcttgtctcctttttcttgatctccataaatatttactattaactttttggtttatattagcctttgtgtgtagagataaaaatattaatgagtacttttttttgccttttttttttttggagacagtcttgctctgtcacccaggctagagtgtgggtggcatgatctcagctcactgcaacctctgcctcctgggcttaaaagattcttgtgcctcagcctcccgagtagctgggattacaggtgtgtgtcaccacacccagctaattttttgtatttttagtagagatggggtctcgatatgttgcccaggctggtctcaaactcccagcttcaaatgatccacctgtcttggcctctcaaagtgctgagattacaggcatga

SEQ ID NO: 340 - DNA, 499 bp, Homo sapiens
  source 1..499: mol_type = other DNA
cagaacaaccctaatattcccattctacagatgaggaaacataaatgagttaggttatgtatctaagattatactgatggtcgtaagtggctggctgcatagtccaccttaccatcatacaaaaattactagcgtaacatttctgaaatggatagttgctaattctcactagttagatgccacatggcacttttgccactgtcagaacctctgctccttttgacctagaacagactgtatggatacagagttattacaccagtaagcaggtctgagatacgcagttcccatagagaaggaagtatgagttgctaagtgaaagcttcctcagttacagcacgagagatgctcagtttggggccaaagagatcagatcagaacaggtatcattgtgctttgcctgctgcagagctgtggttgttattgttgttttaatatgtccccgctttaaggaacttttcctttgatggagctaaaaatacttttataatccaaatta

SEQ ID NO: 341 - DNA, 499 bp, Homo sapiens
  source 1..499: mol_type = other DNA
gttagtacaagagtgaggtctttggtttgtttgtttggagacaggtcttactctgttgcccagcctagtctcaagttcctaggctcaaacaatcctcccaacttggcctcccaaagtgttgggccaccacacccagccaaaagtggggtcttcatgtggcctgctcactagtttttaagacatccagacattcaacaggaagtatatccttttctgaacagataaagccaccttttcaagacatttagcataattgccattcctgtatgaaaaagcatttgcaaattttattgggaaatattggtctcttgctttctgaagcaatatgtcactgtagcctctagctgtgaagcttaagtttttatcaggtgcttactttttgccaggtgcagtgtcaaacccttaatattatttcacatcctcatgtcaagaggtgaggatactaaagcacataaatgctgagtcatttaacccagagacatataatggtaaatgccag

SEQ ID NO: 342 - DNA, 499 bp, Homo sapiens
  source 1..499: mol_type = other DNA
aaagcggtaagaaacccagtgggtactgggtcagcagtcttctcttagcacttctgtgttagtcataaagactgttgttgatttggccaggctcagtggttcatgcctctaatcccagcactttgggaggccgaggcaggtgaatcatttgaggtcaggagttcgagaccagcctggacaacatggcgaaaccctgtatatactagccaggtggtagtggcgtgcgcctgtaatcccagctacttgggaggctgagacaggagaatcgcttgagcctgggaggtggagggttgcagtgagccagaatcgcgccactgcactcctgtctgggcgagagagtgagaccctgtctcaaaaaaaaaaaaaaaaaaaaaaaagtgttgatttataatacctttgtggctttgcattataattttacttaaaagggggggatcttttgcaaacctgagtgaatataaaactatggcagccacccttaacaagtttctttctttca

SEQ ID NO: 343 - DNA, 499 bp, Homo sapiens
  source 1..499: mol_type = other DNA
taggcctggctcggcctcaggcttattctgggacccaggcacatttctgcttctctggcctcactttttcttatctgtataatggagggttaggagtcaaggatctgaagatgccaggcaggacagcggggaaatggaacacgccccttgccagtgacactcggagggcgcaagagtcagtgtcgggctcatcgtgagcaggttctttctgcccccagttcagcaacccgtctgaacagatctggcgtcctggagaattctagaatgaaggggaagagaggcagggaagagctgggaaatacgcaaagcgcctttttctccactttcggagatggtacgtgcgcgcttccacgcagtggcggctgctgcggcgagcacgtcccctgcgggacccacgcggggagtgggctggcagtgcgcgcacagcggcggcgagtgggtcgtgcacgcggatgcggggtgggagtgggggcgcacgcgcgggcgtgggcgagcgggc

SEQ ID NO: 344 - DNA, 499 bp, Homo sapiens
  source 1..499: mol_type = other DNA
ctgtcaggcacaccccagaagtcaggggtccttgaagcccctacgaagcccagcccggggtcccctccccacgtgggtggacaggccgagtcctgctctctggctgcacagcaggaggctccgaggccccacccagaggctgtccagatgcagccccccagcctccaggcacagcccatccccacaggggtgccttctgccctcagccccacccagcccagaatttggggtgagatgttagcttcctgctccacaggtgacactggcctggcagtcttcatgtaaccccaaggataaactttccagaaggaatagctggctccatcccatctcctgccctcctaactccctcctgcacccaccctaacccagcagacccagctctgaattcctcccagcctgctgtccacacgggcttaacgcgcttctcttctctccctttctccctctcctcccgccctggttgcccatctcctgtgggacggggacggctccctag

SEQ ID NO: 345 - DNA, 499 bp, Homo sapiens
  source 1..499: mol_type = other DNA
taaggctgaggccccgttccagcgtgcgtcgctcctccaccccgacatggtctcctgcttcatgagccgtttgctttgttctgcatgatggggacagtgttggggccgccggggtcaggggggcagccctgagtgaagctcgctctgtccaggctgcctctgggctgtgggaggtggcgacttccccaagggacagacttgaaggcccgaggagggcagccccagcctctctgaaccccacaagcgccgggcagaccctgcctgtggggaggaaggcccatgtttgaggcaagggaggtcataatagagacagcaggcaggacccctgagcccaggcacagaggcgtgtgatgctgtttcatgactgcatacacagtgggggagtgtgtgggagggcaggaccttggagtttctttccatccttttggggtttctggggcatgcttgcagggagatcagtccaggtccacttggggcctcgtggtagaggagccttcag

SEQ ID NO: 346 - DNA, 499 bp, Homo sapiens
  source 1..499: mol_type = other DNA
cggggttcccgccaggagcgacaaaggacacccccattgtctatgcatcgagtatgtgtcgaagggggcggctgggcccggagcggcaagacgcctgtcccgagatatcggggtcccgcgacccacctcgtgtcccttgggcccgatcccctcctccttcccgcctcccccggttccagtcacccgccccccggcccgggtcccaccggctggagtgacctcctcgccgcggcctgggcgggacaagttccaggagcccgggaccccgattctgcggccgagtccactgcagaggcggggatggagctgcgcgctaggcgccaactccctccccgcagctccggccccacctggcagagcgccgctcacggaagcccagcgtcggaggacccctggctgcagccgccaatcccgacgtgtcggccgaaacccctcctccggcgcagttggctcctcctggatcccgcgggactcggcgtcgtttccgggtttgcccgcc

SEQ ID NO: 347 - DNA, 499 bp, Homo sapiens
  source 1..499: mol_type = other DNA
tattgggcgtcaggcaaagataattaaagctatgtccatgagtcttatcccttgaggccttgtccgcttgatattttctttgcctaactcacttttaaaattttattatttttatttttttgagacagtgtcttggtccgtcgcccaggctggtgtgcagtggcgcgatctcggcttactgcaacctccgccccccgggttcaagagattctcctgcctcagcctcccgagtagctgggattacaagcatgtgccaccaagcccggctaatttttgtattttttagtagagacggggtttcaccaggttgaccaggcaggtctcgaactcctgacttaaagtgatccacccacctcagcctcccaaagtgctgggagtacaggtgggagccaccgtgcccagccctaactcacttctgaagttgctgctacttgcactgatttcagtttttttttgtttttgttttttgttttcaaggtggagtcttgctctgtggccc

SEQ ID NO: 348 - DNA, 499 bp, Homo sapiens
  source 1..499: mol_type = other DNA
gtaaagcggggccggcggttggggcgcggcatggcggggcccgtcctcccctcagggcgctgccgagacctagcgcggccctggggatgtcgaagccgctgcggtggcggggcccgggcgggcgccccgctgtgtgccgcggggttgtgcgcccggaatggcagcctgctcgcccgcacgtttttccgtcagggaaggttgtggaaattgccatctccgtcttgcagggcgagacggggaggggaggggtgggagttgttttctcaaggaaagggggtcgaggaggagccccgtggccgagccagcccctgccgagccccgcgggtgaccttggccgtcccggagcccagcagtgtcctgcacccgcgcccggctcgccgacgtgtggagtcgggatgtggcgctcggccgcgcatccccggcggagatggcgacggcctggcctagcttggggctaggagtcgcgccttcgaggaccttggcttagcgagttccttgg

SEQ ID NO: 349 - DNA, 499 bp, Homo sapiens
  source 1..499: mol_type = other DNA
ttccctattctccagcctcgtgtacattgggcaaacaggccccgaccatcccacgtgctcagccccagctctaggccaaatcgcctccgctcccactgacgtcatcacggcgcatcacgtgcctcccgagaccccaccccccaccgtgacgtcccgggcctcggccctggtccaaagtctacccgcctccttgtgacagaagtgcgactgccagctgccgaggcgttcggtcctgctgttgcggccgctgccccagggctgcggggacggtgagtcgactggacgcattcggagacggcttcgcgcgggagccctcctccccgggggaagggtctgggcgccagctctcctcaggtcggggcgtgacctcggaccgtggcgccccctccccgcccccgcccgcggcgcctgggcggtgcatgccgggcaccgtagtccccagcctctcagagcgggttgtggtggggggggtgaccgggcggactacaagtcctagaag

SEQ ID NO: 350 - DNA, 499 bp, Homo sapiens
  source 1..499: mol_type = other DNA
gtaagcaccttgcctgcccctgaagagccaccacttggctctcccaggactccataaccttctcgcaaggtctctggaatctctgtcttgggaatttcaaactcagctgcccccagaggccatgtcaatgagcatagcaagccatgtgtatacaatagggagtggtgaggactgtggctaagtggaggacttgtgccccatctcaagaatacggctctaccccatagtcgaaactgaggcacaattggcagatcttccaattattcaagacaagccagaaattcagatttttgtgtcattttacgacaccgtaggatgaaccaaacacattcactggccccccagcccctagaggtcaatgttactttaaaacccaggatcgttgcccctcctcccattcggctgcctcttccacccctatcagactccaacaactgacctgatctctctgtcttcaggatacgcgggagtatgaagtttccatctgaaccccaagact

SEQ ID NO: 351 - DNA, 499 bp, Homo sapiens
  source 1..499: mol_type = other DNA
ctggctcagaccccatcccctccccctcctctccctgcagttgcctatgaggagctcctggacaaccgaaaactggaaggtcagtgagagcacaggtggagacccaggctggccaggttgggagggcaaggcagaggctggggcaggaggccaggccttggagggatgaagcccagggtttgaggcccagggcaggaggctgggagagcccaggaccgggcccagccacagctcaccggcctctcctcctcctgtagtgacccagaccacagatccatcacggcagctggaaggggggaacctggccctggccatcctgctgcctctaggcttggtcattgtcctcggcagtggcgtttacatctactacaccaagtaagtagcctgcttggggactgccggccagggcagacgtcttgcgagcctggcactggagcctgggtcaggggagctcaggggcttacctgttgataagctcctctgtcctctccctttccca

SEQ ID NO: 352 - DNA, 499 bp, Homo sapiens
  source 1..499: mol_type = other DNA
ggaggctgaggcaggtgaatcacttgaacacgggaggcggaggttgcagtgagccgagatcgcgccactgcactgcagcctgggcgacagagcgagactccgtctcaaaaataaataaataaataaataaataaataaataaataaatataaataaaatataaaaagtagcattgatgtttacaatatccctgagcggcaggcgtttctcccttttgcagatgctcagtggcttggccggagatacatccaagtggtgggtgtagcctgggggttcaatcctcctgtggcgccccagaacccggtgcctcctccaacgtccggcatctgatgaggatccgacccaggcgggcggcggcgggattcgctcttccccttcgctccccgcgagaaagccccgagggccgcggcggcgcagagccggtgacagttgaagcttaggcgggaagagggaggcgcgaggcgggaagagggagtttgggcctcggcagccgccgtac

SEQ ID NO: 353 - DNA, 499 bp, Homo sapiens
  source 1..499: mol_type = other DNA
tgatgggtgctgaccgactggggaagcccggagtgtggggactgaggaggggagtggcctggggcgcgctggagcctgcgaggaaggcgccgcctcggatcccccgccccccattccccttcccgaattccaccctccggcccagccatggcctcagtttccccaaacaggaaagggaaggagggtgggcaccccggtctaacggtgcctctcagcctctgagacccagaaccttccttctgcagctcccggactgactggctctgcccttccccatggacgtaagtccgggccccttcccctctctgggccccctcagcgccctctcctaaccccgaatgggcctgtcttccagcacggactggggagggggcttctacccaacagagactacaacctgccagctcaggacgagagctgtcaggaagagtccaggaatggacttcccacgggagggcacatttctggtattcctggcaagataaggagttgactaagt

SEQ ID NO: 354 - DNA, 499 bp, Homo sapiens
  source 1..499: mol_type = other DNA
cgctgggccccggggaggctggggccgctgagcaagggaaaaaccgcagcagccccagctggggtccttcccacgacgtccacccccatggccagctcctcagtcagccaagcctggctaaaacgagagaatgccccctcccgcccgttcacttactggtgcccagcaccgggcactcagtgaggccttgcaatacggttcacttgttgaattgaattcgtcaattgttgagcgggccgtgctgccaggcaccgcacgttgtgtgtctgccctactctcgtggaaccaaggtccagtggagagaggaacataagcgaatgaagaaagaagcaatagagtctcagtgataagttcttggaaaaaagtaaaacggaagagggttgggatgggggcggtgggagggaaaccattttaggtaggaggggagacggggtggggggggctctgcggaaagttggttctgttccccagtctctttctccgtgtctttggcctttag

SEQ ID NO: 355 - DNA, 499 bp, Homo sapiens
  source 1..499: mol_type = other DNA
tggggaaccagagagttgggcctgtcgggctttggtaagggggccctgggactttcttcatcttggtggtcggccggctggctaggatcttggcttgagtttatagcttcatgtaaggtgagcccacagccaggaaggatttctgcctccccacaaccaggatgtctggggtgggtgatagaggggtccctaggacctaggagagagttatagcctgggtggaattcaggaggcagagccaggaggggttatcttaaaaagtaaatactcctaagatttgtaagaagctaataatcacctagctgcttgctagagagagtctgactgagaatagaagtgggaaggagggttccttgatcttgccctcacccgggtcactagtgtcccatgaatgcatggcagtaagcttcagggggatcatgacacttggtcccattccagtggggacttgggggttttaatgagctcctgggcctcctgagaccttgttgagacactc

SEQ ID NO: 356 - DNA, 499 bp, Homo sapiens
  source 1..499: mol_type = other DNA
acatagcccagttctagggactgcattccaccctgtgtaagaagtatagaaaattacagctcagccaagaacattgatttttttctcccccgaacaaaataaccgagttttcaggatgaaagcagagctgctggttgagttggagggtggagagcagagccaggcccactctgccttcctgctggttgagttggagagtggagaacagagccgggcccactctcccttcctgccccagaaaactctggggccccatgggctgcagcttggagctcctgctttaggacatccatgtggtagaaggccccacgggccccaggaaccccaactgtgcatgctcaggtcgtggccctccctggagcaggctgtgggctgagctgcggtcctgctgcactggctgggctctcatcacagtccccgctaggggagagcccttggctggcagaggtcttctgtccccaccaaagcgtcaaagcccaccatccacctctcctcacag

SEQ ID NO: 357 - DNA, 499 bp, Homo sapiens
  source 1..499: mol_type = other DNA
tgagtgtcccagcgggcgcatggcctggagccgggcagtgatgcgggagtggaagggactggtgatggggattggcagagcaaggaggattctcggctgaggtcacgcctgccgggagatgttctcccataggtagagggtgtcaggaaggaatgagaaggggcctctcttcctgcaccccaggaggagaaagaggccagaggaggcagaggacgcaagagacaaccaaacagtggaaattcccagagggccgggaccttgtcactggcttgtcctggagagtgcctggcactgcaaaaagacagctttcaagtgtagcagctttgtttttttatagggagcccctgaccgcataaatacaaaccaaaacaacagccatataggcagaaaagaaatggtgccattttgttttattttagaaaaaataataagctttccattccccatctttaaaattaagaataaggaatatgtaagtctaattaatataataaatgta

SEQ ID NO: 358 - DNA, 499 bp, Homo sapiens
  source 1..499: mol_type = other DNA
tgagcccccgcccccgctcgcatcctgcgcactgcgcgcccttgtacctgcaaagaaacccacgccctgcgccttcgctcaaggacacttgggggaagggcccctgattccctattcttcacctcgtgaagggcgggcatgcctgtgtcgcggagaacagggagacttggcaccccatctcctcgtgacaggcgtggggacccgagttcgtccacattaacccttcctgtggcgtcgccctctctaggtggctcctgcacctgcgcggactcctgcaagtgcgagggatgcaaatgcacctcctgcaagaagagtgagtgcggggacccttcccctctgccgccgccccctctgctctgcggagtcggtgtctcaccacgcaggatgtggagagacagccaggccccgatcccgtggtttctgactcttgctggaatagaaccacccgggcagacattaaaatacagatgcccctgccccacacccaggaattgatggc

SEQ ID NO: 359 - DNA, 499 bp, Homo sapiens
  source 1..499: mol_type = other DNA
gtaagggacgcccgggttctgtgccttgggatgccaaattcccagacaccatagagagtgtccctgggtttgaggaggtcgtattttgctatcagaggtaaaggggactcctttattggtccagtgctttcctgttggccaagctcctgagggcattttcctcctccctgttcctctatgtcagagttgagggtcctgaggctcaaggctgtcctgctccacgtcacctggttggtcacagggctgctggctgagccccaattctctaacctgactctgagctaccggattggataggagacattggataggaggggacattgcctcttccaggttcaggacagaaagtcgaagtcttcctgggccatgtctgcagcctgggactttcctttggagtagaaataggagggtgcttggttttcccagcatgaatggagaggacatggggcttctcttcctctgctctgagtgggaaaggagctctgagggctggctctgc

SEQ ID NO: 360 - DNA, 499 bp, Homo sapiens
  source 1..499: mol_type = other DNA
ggatactgccagagatgcgaagttcgcacccttggcctgccctttgcacactactcccttgctatgctccccgctttggcagatccagaaagtggagcacaagactggggttgccctcgactccaggaaaggcttagctattgactagagacctgggcgttggtgaaggtgaggggaaagccagaatactggggtaggcggaacgccaaggggcgggtgtagcaggcaacctcagggaagctgggaaggcctggcagggtgagagaagccgcacacggggggcacagcgcctccctcgcgagccggtgcgaaaggggccgtcctgcggtgtgcgcccagctgcgctcaagggaccttgcacttggcccatctcctgcgcacagcccaggccgggaccgcgggcggtgcggactcagcgggctgggtgcaagggcggggcggggcgtctgcgcccggccccgtctcctgactataaaaacagccgctggctgttgggctc

SEQ ID NO: 361 - DNA, 499 bp, Homo sapiens
  source 1..499: mol_type = other DNA
taatctgaatagttattaaacagtatcaaaatcttttaactactaagaggccaaacatttaagatggcgaatttactgttctgcttgaaggacagtacaattgacaagggcacaatgatccgagatgcttctgtatgttgtatctacacatactgtagactaaaatggcagaatctgtctgctgctgtataaaatcttttaactaccatttattttagcatcatggcatgtgcaaattcctgctgctcagttaagggaccagcttcacaactggtgttacaatctgtggccacagcactgcatcacaatgcagcaaatgcattttccacattaaccaaacatgacagctgaagcgattattaaccatgcaagatgtcggaagtcatcaaagattcacatcagagtaattgcagtggtttgggttggggaaaaaaagtatcatagcattccttgcctacatgttgtctctccccctcttaaatcttaacttggtacagtc

SEQ ID NO: 362 - DNA, 499 bp, Homo sapiens
  source 1..499: mol_type = other DNA
taggattggccgtgttttgtaaagaaattaagacaaatgcaccctggtaaatagagtggcagcatgttgttgcagtgcctctgaaagacaaggtcttggtttgtttgaaaatttgagataaatttggaagcagttaactcatttgatagaagaagtacttgattcttctgagaattgttcagatttgtatcttgccattctaatattttttcttttaaaaatgtattgggtggggcagaatttgcttaaatatttaaatagttggttattgggatttttgtgaacttcttctttaagtagcaagtagtgtggtctttaggatttttaaaggagatacatgtgaagtgcaaaattcttgtatgaggtggaatatgaaaatagaatttattttatttactaaaaccagatccttctttgggattgcaggtgagagtgagtgagtgcgtgtgtgtgtttgtttgtgtctgtggtgtgtctgtgtgtaggattctttaggaat

SEQ ID NO: 363 - DNA, 499 bp, Homo sapiens
  source 1..499: mol_type = other DNA
gttggttttgagctcctcacctcaagtaatctgcctgcttcggcctcccaaagtgctgggattacaggtgtgagccaccacgccctgccatagtctccatatttcacagttttgtgtctgtgcacttgtgcagttgttccttggtcccttgctattcttggaggattggttctaggacccactgggacaccaaattttaagtatgcttaagtcctgtatgtaaagtggcatataacctttgcatatccccttaaatgacatctgtagtgcttatgatacctaatgtagtgtaatgctattatggaaataactattttaaactatattaataactttttaaaatttgtgttttttattgttgtattattatttatttgtatttatttatttatttttgagacagagtctcactctgtcacccaggctggagtgcagtggcgcaatctcagctcactgcaacttccgcctcctggggtccagtgattctcctgcctcagcc

SEQ ID NO: 364 - DNA, 499 bp, Homo sapiens
  source 1..499: mol_type = other DNA
agttcctttgtgattaccattatgggttctgtgatgtgatcccacctaattgtatccagttaagaaatttgatcctgagtgcctttccaagaaacatgaggctccccgacccattcactcctaatctaaaggtaaggttccaactagttaaaggaaaacttatgtcttaatatttcagtcctttctctgataagtagactgttcagcactttcctacccaacataacacgcacactattagttaagggtactctttaaaggaaataatgttattaagcctgatagaaggtatgatattgttgctattgctgttgctggtgaatattggttcacagcatttttctagttgctagttttcatattaattttgatattaaatttagctctatttacagaaccacagcttaggtgttggggcagtcatttgctgggtgtgccccacatggcaaagaattgcagaacaaacagacctttgtaatctttttctttttttgaggca

SEQ ID NO: 365 - DNA, 499 bp, Homo sapiens
  source 1..499: mol_type = other DNA
gtacgtgcgggaaggggctcttcccggggttgggagggagcccagcccgctatgcttgcgggagcggagtagaactggaacctaggaagtagcgggaagagcagaaaggggagttcggggtgggggttaggaccgtgaggttttgttccaggtaacatttgtaatcgtggaggggggaggcttctgggagaggtaattggaagggtggttggagagtcattccaggttcttttgtgggagggaagccgagagacgagtggggtggggtcctggaggagtggagtacttgagaaccgggaacaatttggagaacgagggtggtagagaaaggacgtttaaagagtaatctttgggaagagggtgaacggtttggaagaccactccagtgggtggtgtggaggaaggcggtttaaagaatagtttccctgggaggcaggaaaaggggttaaaacagcttgtaatttggaggggggtggagaagaggggggaagcggattga

SEQ ID NO: 366 - DNA, 499 bp, Homo sapiens
  source 1..499: mol_type = other DNA
cccggtgctcgcctctctccgccccggccccacgtgcgcgcgcgctctcaggctctgccccggaagtgctcctggcgcatagtcggaagtgcgcaggcagtgctcgcggcggcggcgacggcggcgggaggttcggttgtcgcccgttggccgcgcggcgccgcgctcggcggccgccattgcaggtcaggccgcgggcggggggcacgggaggctgcggggagcgagggccgagccgggattgggggcgagggcgcgagggagcgggaagctagggagccggggccgggcggggcgcgcggctcggagagaagaatggcgagccgaggggcggggagcgcgggcgggggaggggtggccgggaagggggagggcggcgggagggcggcgcggaggtgggggcaagcccggaggggcctccggggtgggagggccaggagtgtgggggaagggagcggtgtggagacggaaggcggagggaaggaagggagcgagcggg

SEQ ID NO: 367 - DNA, 499 bp, Homo sapiens
  source 1..499: mol_type = other DNA
gaccactggatttagggcccaccccaatccagtatgactcatcttaactaatgacatctgcaatgaccctgtttccaaataaggtcccattctgggggagcactccaacccgctacaccttctgaactccagggaccccagttctgcctctgaccaggtcccgccacttgctgatgacctgtcacacctctgccacctcgtgcttgcccagacattaaggacagattcggaagctgccaacttctgctctcctctgtcctctcggaccctgtgctagttcctcccagtattttctagctgctgaatgtatgttgttcatcttggatctctaggtgcaaatgccctgagggctggacccacacccctagctccactggcctagacacctgcctgttggccagctgggagaagacattctccacgaagcccccgacatgcccaccccgtgccccccttactatttagtgctgagattgattttttctctctctttttacag

SEQ ID NO: 368 - DNA, 499 bp, Homo sapiens
  source 1..499: mol_type = other DNA
taagcccagccctgtctccgattgtgtgggattttcctgacctatgcctttgagcatgctgtgtcccagttatgtatgccataagcaggcctcatatcgctggtcttgacacagcattttatttgtaaggataaaaaatagactgtcccctaagagtaccctatctcaatatccttgggtgtctgggattgaggggtattcatgagtggacaccaggggttgatgaatcctcctgcaaagctgcaaagctttgtctgcgtatgcgtatattaatatatatgtagtatttttttgtccctagggacagagtccatagcttccctcaggtgcttaggggtcatgattccagattggatgcccaggaggtttcaagtgccctgattctagaccagagtttctcagcctcagcgctgttggcatttgaggctgaataatttgttgcaggggctgccctgtgcgctgtaggagactagcagcatcccgggatctacccatgaga

SEQ ID NO: 369 - DNA, 499 bp, Homo sapiens
  source 1..499: mol_type = other DNA
ggtatgtgcctacacgcctggctaattttttcttttttttgtattttttttagtagagacgagatttcacaatgttggtcaggctggtcttgaactcctgacctcaggtgatccacctgcctcagtctccccaagtgctgggattacaggcatgtgccaccgcgcctggcatggaacctggttttatcttgaaatgttgcaaacgtttataaagatacagtatttctaaattcacatcaacatcttatgataagggctagctcctacttgtcatatgactgccccggtacaagcattagatgcagcctccacagcagggagcagatgacttccttctggaggcccctttttcttttttccctttttttttttgagacgtttcgctcttgttgcccaggctggagggcaatcgccggatctcggctcactgtaactcgagaatcaagcgattctcctgcctcagcctccggagtagctgggattacaggcttgcgccacc

SEQ ID NO: 370 - DNA, 499 bp, Homo sapiens
  source 1..499: mol_type = other DNA
tgatacacctgcctcggcctcccaaaatgttgagattacaggcgtgagccaccgcacccggccctttttctttttttctgtagcctaggctggagtgctgtgacgtgatcacggtttactgcagcagcgaccttctgggctcaagcgatcttcctgcctcagcctcccgagtagctgagaccacaagtgctcactgctgctcccctaatttttaacttttttttttttttttttgtagcgatgcggtttcactatggtgtccaggctggtctgcaactcccgggctcaagcgatcctcccgccccgcctctcaaagtgctgggaaggtcccttccaggcttaagcagcgataatggttttcaagttaaaaacaaaggtaaccaaggaaaaagttttctctgaataccgagataaattagggaaatcgccagagactgtggtgctgaggaaacactactgaattataccacacagaccggagcgatgctggtccaaaggg

SEQ ID NO: 371 - DNA, 499 bp, Homo sapiens
  source 1..499: mol_type = other DNA
gtatgtattagattatttgcccatcagatattactgattcagaaagagaaactgctcctcctccaccctggctctttctaaagcagaagtattaatatatttaattttctacaggatattcaaatagaagccttgctgatgagagcctgtgagcccataattcagaacttctgccacgtaagtgatgtctggaggagcaagggttaaaaacagaaacaaattgacagggactctcccctgagtatctcagactcacctctgtctgcagcatgtattactcttgagtgttagccagctttgacaagttaaaattaaaaatgtaaacaggccgggtgtggtgaccaatacctgtaatcccagcactttgaagccaaggaggagcacttgagcccaggatttcaagaccagcctgggcaacatggcaaaactctgtctctacaaaaaatagaaaaaattagctgggcgtggtggtacacacctgtagttccagttacctagg

SEQ ID NO: 372 - DNA, 499 bp, Homo sapiens
  source 1..499: mol_type = other DNA
attttgtggggccagaaatcagagaagtggggaactaccattttgtcttaaaccttttagtactctatttgaattgtcataatgtaaaattacgtttctcaaccagttcttttttgctttctagttttcagaagttcattgccttctctcatttcgtcgtcatctctcacattatcattgtcatcatggacttatgagagcagtctgggtgtatagctctttaaaggaaggtgttttttcaggagctagtgttgcacgggtttctctctttaaaggcattattagtatgtgttccccagtaacagtggtttggcatctgctttgagggcagtgctctggcttatgagcttataaactgaagatggatatcagttacccctgttttcattttgaactacttagcattttgggaaaatctgcaaaggctttgcatactctaatgttattgctacatgtgtttttacctcacttttcttaattctgccttctcatttgttca

SEQ ID NO: 373 - DNA, 499 bp, Homo sapiens
  source 1..499: mol_type = other DNA
gtaagagcacctggggaggggagggctggccctggacccacttcccccactaggcctcatcctttcaggtcgctggggatcttacctgctgcaggcagctcccccggggcaggcgcggcagggagggggccttggtcccagctgctgcgccccccagcacacacccaacctgcccctctggccctgtcctccagagtctccccatgctgtgctgtggggcagggggtgctaggctctatctggtcctgggccggatgcagtcccctgctgggccaacccttctgaggaggctacagctaggtggtgtgggcagcagactcccaggcctccgacgtggcctcttgtcctgtggggctaggcgccccagtaacggggggttccttgcctgtgggtagtgccctccagagccagggcctcagcccctcaccccaccggtgtcatcagctcatacccatgctcctctgtggagccttctgggtcagcaggctgtagagacgtt

SEQ ID NO: 374 - DNA, 499 bp, Homo sapiens
  source 1..499: mol_type = other DNA
cattttgcagaagggggagaccagccactgagctccagggcgggggcccactttgtccccttcctccgacctgacacctgcctctggggcccttaccgggaggctgggatgtattcctgagttcgcttgtccccccgcttgatgcctgatagtaggggaggagaggggcggcaccctggccctggggctgcctgggttctgtgcgtgcacctggcagtgggcctgtgctgtgttttctctgcattgtatgaggcatgtgtgtcagagaccgtgtgggtcttatgtcagtgactgtgcctctgttctctcctcctgggctctggctgtgttcccctaacccccgggggacctccacggcctgctagtggggtctcaggtgtgcagcagggtggcctgtgattagcagtggggctgagtcattcccctaaagagcttttccccctggtggctgcgttgctctgtttttctaacagaaacatttggtcactgtggctgccta

SEQ ID NO: 375 - DNA, 499 bp, Homo sapiens
  source 1..499: mol_type = other DNA
gtaggtacaccggcttttctttctgggtttggggaggggtgacgggaaggcctgggcatcgtgggccaggccctgcttgggttggtctcgagagattgggactggagacgtttggacctggccgttcttggtgcctcgtcatctcgtcctggccctggacccctctcaggctcgggcttccctccccacctgctttgccaacgctgccgcccctgtctctccccgtctactagccgtctgctccccaggcctcccagacccctccgtgcctctttcagctttcccctgttagcctgtctcctccagaggacccaggagaggaccaggctctcctcccctctgcacccaggccaggcagtggctgcatgcgtggcccgtgggctccaggtgttcagatgctgctcccgcaaagccagcctgggcctggtgctccctgtgggtgcaatgagctgcccgctccagccctcctctgttcactctggaagggaacaaactctga

SEQ ID NO: 376 - DNA, 499 bp, Homo sapiens
  source 1..499: mol_type = other DNA
ctccagaacctgccctggacccctggagggagtgggctcagtacaaatggtacccaaggaggagggccacaggaagtgacatcgaccggccccccccacctccttattccctataaaaagcaaaatggtgactcagagaggagagttggaagcgtcctgcctcttgctcccactgttaatttttacacttggaattaggcagaaggcaaagaaaacagcagcttgaaatacgcggctgacatgctcttcatcgggtagcaacagcagagccgctcctccccgcctcccagcagccccggagcgggcagggcccggtgcctgctggctctcccccgcccctcaccaggcccaggcccccgcacagcccccgcccgggccaggcgtggatggtgcggccggggccatggctgccgggggccgccgccggcgcccactacgctaccagtccctggcagctctggtggaggattctcagtggcctttcttgttccttgtctca

SEQ ID NO: 377 - DNA, 499 bp, Homo sapiens
  source 1..499: mol_type = other DNA
cattgcactccagcctgggaaacaagagcgaaactccgtctcaagaaaaaaaaggaaagaccccccctccttctcccgccggaaataccctctttcaggacggcgcgcctgtgcggcgcacgcgcgctcagttacttagcaacctcggcgctaagccaccccaggtggagcccagcaacaacagagccaccgcgtcccccaccaatcagcgccgacctcgccttcgcaggcctaaccaatcagtgccggcgctgcaaggaagtttccagagctttcgaggaaggtttcttcaactcaaattcatccgcctgataattttcttatattttcctaaagaaggaagagaagcgcatagaggagaagggaaataattttttaggagcctttcttacggctatgaggaatttggggctcagttgaaaagcctaaactgcctctcgggaggttgggcgcggcgaactactttcagcggcgcacggagacggcgtctacgtgaggg

SEQ ID NO: 378 - DNA, 499 bp, Homo sapiens
  source 1..499: mol_type = other DNA
ggcggttggctttgttgggtgagcttgtttgtgtccctgtgggtggacgtggttggtgattggcaggatcctggtatccgctaacaggtactggcccgcagccgtaacgaccttgggggggtgtgagaggggggaatgggtgaggtcaaggtggaggcttcttggggttgggtgggccgctgaggggagggcgtgggggaggggagggcgaggtgacgcggcgctgggcctttccgggacagtgggccttgttgacctgaggggggcgagggcggttggcgcgcgcgcgcgttgacggaaactaacggacgcctaaccgatcggcgattctgtcgagtttacttcgcggggaaggcggaaaagaggtagtttgtgtggtttctggaagcctttactttggaatcccagtgtgagaaaggtgccccttcttgtgtttcaatgggatttttatttcgcgagtcttgtgggtttggttttgttttcagtttgcctaacaccg

SEQ ID NO: 379 - DNA, 499 bp, Homo sapiens
  source 1..499: mol_type = other DNA
ctggcgtagcgatacagaacgtcgtctagcgaggtcgactccatgcccaggtcctgcaagagcaaaggatgcccagaggtcagggctggctgcccacccagctcgcccaccatccccaagagaagtaggcacagacccctagaggcgactctgcctcccagagccccggtggggagcatctgcagaacttccctcaggggctggggcaggcctctcctgtttgtctttgcctccaagttgaggaagagcagggactggcctctgcaggctctgcagtttgtgcaggtcctggcttgtggccctctcctaggacagcccctgacctttgtctctctggttttccagaggaggaagccaagggtggcctgcctcggtgcaagcagctgcttctctatggtggcaaaatttggaattaactgccttgtgacaggatggtttaatgatatttatttgtgttttcttcctgcttctgacgttgtttttactgctccttctgtag

SEQ ID NO: 380 - DNA, 499 bp, Homo sapiens
  source 1..499: mol_type = other DNA
tactgagtggaatcttcccgatgggaggggagcagcttggaggcgagtgctactaagtgtggtggggccgcggcagaaaccgctggagcagagcttccctgggtctgaggaaggaattgggtttgggggctcaggacacaccaccccagaatatggtaccctggcatctgaggaggcagctgacacaggaaggtctctctgactgctgttctcccccaaagcaggccctgaagaatcctgtgaccttcatctaaagtaggtcatgagacccctgagcttaaaacggagtgatcggctttggagaagtaaggagacatgacgtgcctgccctggggtggggactaaacttcgtgccactccacgtgaaagggggaggtacgcctgctccctttcctcaagcccccccctcccaatttctgccatccttgggtatgagctacacgacagtccctgaccctagcttggtgccctgcacagaccaggcaatgctgacattccc

SEQ ID NO: 381 - DNA, 499 bp, Homo sapiens
  source 1..499: mol_type = other DNA
gtaaggccaggcaaggcgggagccactcaacatctccgcttcatttccttggctcttcccctgccatcctcgtcctgctacctgggactccgggatgtgccctttcgaccctttcctaacatctttgctcctttccgcgtacttgaaaccccatggctcaacctcttctgttctatccctcttcagctctcccagctggacctcagcttttccaatcccaaatcctcctctacttgttggatttttccttggagtctgtctctcctacccagagcatttccttctcagcctgctccctctcctcctaggctaggtcctctctccagttctcccgccttctctgccccccggtctaggtctctcccgctgactggttagcctgcatcaccactagctcccctcagtctcatctctctctcaggctctctactcctttcagccttggtcctctgccctcccgtctgggtgtctgagttgtggggaattgaagtgcttccta

SEQ ID NO: 382 - DNA, 499 bp, Homo sapiens
  source 1..499: mol_type = other DNA
cctgcccttcctcccttcctctgctttcaccaaaactctgggcactggactgcttgttccctggctcaccgcctggaggaaacagaaaggcttcattctcttactttccccagccccctcgggggtataccctggcaaatatgggggtgaggacagagaagctcagttcattacttcctgccctgaacttgggcaccttgaagatgcttctgccccacctactcaacctgttgttactgttctggtgcctcctcttcaccagactaagcttaatccccagcatccagcaagtgcccggcacgtggtaaagggattgtggcagaaatgaacgcaaggtcatggccaggctccccgaggtgggagggcagtccctaacagccacggatgcctggcggggcgctcactccacctcgccgccccgcctctgagggcgtggtcttgccccggacaccagtcctggggagggggtgtggtcagggcggggcatgcaggccacgcc

SEQ ID NO: 383 - DNA, 499 bp, Homo sapiens
  source 1..499: mol_type = other DNA
gtatatggtgcctgccggggcagcaggcctgaaggtggggtagggcggggaggcatttggtgtgcagcatctggggtgccatctccccgggatccctgcatgttggggaggttgctggcatgggcctggccacctctcaggtctctcctctcctcccaattcccatctccctctgccctcagccttgacttatccgaattggccaaagctgctaagaagaagctgcaggcggtaagtctgctccaacagtgccctgacacttgaagctggcccctctctgatcccccaccctctgctcttgcttcctctgcctctgactcgatgaccttttccaagtctttgacctgtcccctcactggcctcagcagtcccctctccctgacctccctacaaggggatggactggtcccttctctcccaccttggagtttggaacatgatccctttccactttcccattctgagactgtaggggctgggcagcacaaggaaggccacc

SEQ ID NO: 384 - DNA, 499 bp, Homo sapiens
  source 1..499: mol_type = other DNA
caggtgtgagccactgtgcccgtccctagggtattctgatgaagtatgtttggagtgtgccatatgcacctgttatcactgcagtgccttaaggcaaggggtagtgcagccaggtgtatccaaaaaatcaccctggctgctgggtggaacaggattgtagggacaaaactagaaggagggagattaagaaacttacaaagcccaggcaacaggtgattgaggaacctggggagcttcactaggactggagggtgagggaggcttcaggtgactgccaggtggctgacactggtggtggacaaacaggtcactgagaggaagagcaagccagaggaggaggggtgggggacgcggtgagatgaattcagctttgtcccttctgggccgggtgtgcgtggagatgggtctgggcctgatgtgaaaaggcgtgtgctgccctgctcctgggtaactgccgcctctgtcctgttcttccctctgctgccttcctctggactta

SEQ ID NO: 385 - DNA, 499 bp, Homo sapiens
  source 1..499: mol_type = other DNA
tcttgctgcagatattttgtttgagcttttttggtgtcatttgcctactttttacagggagagagagaattaggccaaactagacttttccttaagataccacctccaagcccactctccttgcctgaccccttgtagcacaaagcctctgaactgaactattaaatctcatctactcattatgttctttttaaagcaaataaaataggagttgaggactcaagttggacttttcagtctgtctgaccactttcactatatatgattttttaaaaaagaaatcacaagggttgtggatgcctttaaaaaatatgtatcttaatgctctaaattcctgctgatttcgctttgtgtatatgctgaggaggcctgcctccaacgtgctagcccatttaacatgaacagtcctccccaagaagcattcagtagccttgtgctcctaacttgtgaccttgtgtgtggcgtggctccccactaagtgtaaatttgtgttttcaag

SEQ ID NO: 386 - DNA, 499 bp, Homo sapiens
  source 1..499: mol_type = other DNA
taagatgaaagctggcgttgccttcgtgtttatccgggcttctctcttcccatccttgtgatcactctgctgaccctgccacaccctggggccatacacatgactcctgtgcctctgcatctcactggccatttcaaaccagttcgtgagcctgtgttctaaaaagctcatctccattaactgcatctcatgtcggtcacctctgtctttgtttcattgactttgctgatttaacacctctgagaatggctttgaaaggagctacaagtaatgtcttcactggcattcttgaagtgactcctcttgggggttaagtcccattggcctctgccttcctctcctgtgatgttgtggttgatctactcccagccaccgggagtagccgtttcctccctgctcctcctagtgcttgtgagcaaaccttacccttcctccctgtctgagccagcctcttcctgctgccctcctcagcttgatgatgcttcaacttagaagtggt

SEQ ID NO: 387 - DNA, 499 bp, Homo sapiens
  source 1..499: mol_type = other DNA
cctacccgacacttgaccccggcagtgtgaaccccgctgggagcgtccaaagccatgcctcatcgcggctgcgcagcgcacgtgcacagcctcgcaggagtctcggcgattggctgtgacgcagtttccggcgtgagcggcgaaagccgggagggcgagcgagagagcaagcaggcagcaggctgccggcgggcgggcggacggcacagagggagggagcgagcgagcagtgagtaagccagcaagggcggtcgggtcccgaggtcagccgagatttctcaggtccctccggccccctccctggagtccacagcgcctccggtgtccagaggatcggacacggcccggcccggccatggcctcgttgctgaaggtggatcaggaagtgaagctcaaggtagcggcaccggtccggcctttttgcccctcgctttgatcccccagcagtctgaccggcttcctactccccatggcgtctttgtctccctggggataccag

SEQ ID NO: 388 - DNA, 499 bp, Homo sapiens
  source 1..499: mol_type = other DNA
taatcccccagcccaacaacgtccctggacactgcccctgcccttggcggctggcctgcctagtatcatagactaggtctgggtgggggttggcacgtttgtgagctcacatcttccctaactacctgtcttttgtctgcttatcaaattcagacagcttcagacacaggaggaagggagggaagggggaggacagaggagacaggcaggtgctgtcctcaaagccctgcgttcttctgagatggaaaaatggatcctcaaaaaaataaagtatttgcagtctgggggcctctcagcttcttattacagttacaaggtgagggaaagacagttggattgggattctccatcctgctcttacctctgtccccaggtactgaattgctctctttgttaattttaggttgattctttcagggagcggatcacaagtgaggtgagtgaaataaatagaaaaatggttgttggttgagaatttcccaaagaggagatacctgga

SEQ ID NO: 389 - DNA, 499 bp, Homo sapiens
  source 1..499: mol_type = other DNA
gtagccctgcctgtgggccagcctgcctcctccaggcagcccttcttgctctgtacaagagaatgggggaaggagggtggaggaagctgggagaatatcctctccaggtgactgactttcaccagagaagtgagatggcttgcccagggtcacacaggcactattgctttcaaaagtacccattattattactgctactattgctattattagtagtagctgatactgttctgttctaagccctgtgcttttcatggattaccttactatgaagtaggtgctgttctttgacagatgagagagccgaagtccagagaggttaactaatttgctcaaagtcacacagctcctaagtggtagagttggatttccaactctagcacatctcacttgggagcctgcattccatgcctctgccagtctgttttgggttactgagcctctaccatatgccaggcaccccccaggacacagagaggtgtctgacctggaaggtgtg

SEQ ID NO: 390 - DNA, 499 bp, Homo sapiens
  source 1..499: mol_type = other DNA
ctgctccccactgccccagaaggaggggtaaggcaaggctgaggaatggggagaaggagcctggggccccagtggccctctactcctcacccctcctgccactccaggaagcagatgaagccaccctggcccgtctggatctggagaggaagattgagtcgctggaggaggagatccggttcttgaggaagatccacgaggaggtgaggccagggcagagggaggaaagctcaacacagagattgcaactgagagagggagagacagagacagagaagctgagactgagagagacactcagagagaggagagaaacagagattggcaggtagagacaggaaatgaaagacaaacagaaagacactaagggagacggaaagagacaagagagcattcgaactcctggccgaggggcaggcagaagaggacacaatggcgtggggaaccccagctgtggcctgtaccctgagccctggtaccgcttctctcaccctggtca

SEQ ID NO: 391 - DNA, 499 bp, Homo sapiens
  source 1..499: mol_type = other DNA
tcctcatatcttgtgtcccagctcaggctataatccctcgataacaacctccttccagcctccttgtccccagtcttatctcccatgcatccatcatcccagcagcctatctgtacaggttcctccctgcctcaaaccccttctgtgattcctctgtctgaagggatgaagtccaagttccttaataagtctccctttgatatggcctttccacccttacagcctctcctctagccactcgctgcctcaaaccatctacggtatagaggttggcctgcccgcggagccgacttcatcttgaaattcttcatcattttgtaacaagcagctgtgcatttccattttgcactggacctcacaaattacgttgcccgtcctgcctgcctgttgttgcttgcacccctcttgcagtttgtggccacctaagctttgtctgtgtagtctcctccacctaaaactcctcttcccacatcacccagctatcttcagctcttcgttt

SEQ ID NO: 392 - DNA, 499 bp, Homo sapiens
  source 1..499: mol_type = other DNA
tatttgcaacggcctcccagatcggcgctaggaccccgccagcagacgtctcaatctgcgtggagaagacccagtgcccgccaggggaagcggctgccaggctgggctctcgagcgccgcctgtcgcaatcccacggccgctgcagcgcaccccctcccgtcccctgccctgagcccgcctcgcgtctccaattggctgtctccattctcccgcccctcccgagctcagccattcggagcctggggtgggcggggcttgaggcctgagtggagcgtaaaccctgattggctgtacggaaggcggcgacgtggccgaaggatgcccgtttgtgtctaaacggaggctcggccacaacgccactggattggtggtagggcggggcgggccacagtctccagcctgaagcggaagtggaggaaagatggaggtgtggggacaggagctgggtgtgctggggactggccgcggacccctaacctgtgtctccggtctccctcc

SEQ ID NO: 393 - DNA, 499 bp, Homo sapiens
  source 1..499: mol_type = other DNA
gtgtgctgattggaggaggagatgtgtggaataaattgggaaaggggacacggagggggaggggcaggcgtttgctgggcctgactctggaaggggaggagctgttaggataagtagggcggagatcccgagaatatttctataaggtatgtaagaaaaaaggggaaagcaggccgcccttgcatcctgatgggtccttacagtggggaggctgtaagaataatgtgcgaagaaaggatggaatacgcttttttcagttttccaggtttcctactaccttcactccatgattcctttggggagttaaaaaagtccaagtgcagttcttgctttgattcaaaattagttccgtacgtttttgtgtgggatcgtaactggtctcacaaaggtgatgaaattgtaaaaatatgtagatgagttaatagttgaggaacggcgtgaggtagtgagagattgtgagatcgtgtgaggtgcgagaaattgggagacataggaaaat

SEQ ID NO: 394 - DNA, 499 bp, Homo sapiens
  source 1..499: mol_type = other DNA
gatgacaggcgtgagcgactgcccctggcccatatgttctaatattctaggttacaacgctctacgctgcaatctctccaccgttacagtttaaaaactataagtccctaccaccctcgcctactgtgcgtgcgcggcgcgcggcgcttcgggccttgtagtcttggacagacccccgaggcccatggtgccgtgcggcgggtcgttgcgcctgcgcggtgcgagcggcgggcagcgcagactgcgaggctcttttgttcggctgaggggagggccgttggccggggcctgcggtacgccgcttcagtgagggacgccactgcggccacccggcttgctgccttcctgggcgccactcccccaggcgacccgacgcgacgcgccagcagcgcagcaccgattcctctcgggctcttgggcgctgctctgaggtgaggagcccgctggaggcgggagagctgggggagggggcgcggcggcggcggcggcgggagccctg

SEQ ID NO: 395 - DNA, 499 bp, Homo sapiens
  source 1..499: mol_type = other DNA
gtgagtccgacttgtgagggaggggagaaggggctgagcccgggacgagccaggggttgctcagagtaagggaggtgtccatggaggcagggtgaggaataatccagaagctattacaaatgtaaagggccgggtgtcccagcctcagagaaggaagatttaaatgcactggacgagatcagggtagtctcaggagttgaggtctgggaagtagggagggaggatttgagactggagcgggcaacgacggtggggcggagcgttagaaagttacatgctggcgtgatttctagttaggtcaactgtgcttatgcccaccccgcctcagccccaccctcccagttattccagagctcactgtccctgtgcagctagttagagcctttctcccaaatgggttcttcagttatcttggccccaggatgtcatccagctcctgcttccataagaagcatgtcgttcttaatacacgatgttgacaagcagtatggtgaggagg

SEQ ID NO: 396 - DNA, 499 bp, Homo sapiens
  source 1..499: mol_type = other DNA
aagacggcccttcgtttcccccaaagggtctcagcctgccggtgatttcaccacgacttcctccagagttccacctgtcctcttcatcagccatgaacttgcccctactaatttttgccaccagctggacgcccacctcctctttcccggagccctaaggctctccttgcggcagtcttagcctctgtacaggataggcacgtgcatttagccccagaaaactacagcccccaaaaggctttgcggcaacatcctcgcgttgatcaccaaagagaaaacgcttttctccgcgggcccgccgctgcatagccttttgggagttgtagttcatctgctaagagccgcagaaccagggtgaggttctaagccacccttcccagaactcacagcgctcttccacaccaataggaagcgtggatcttggaaagcgggcggggcagaggagctcatgcgcagtatgtgtggttggggaattcatgtggaggtcagagtggaagca

SEQ ID NO: 397 - DNA, 499 bp, Homo sapiens
  source 1..499: mol_type = other DNA
attacctcaaatcccttgaaccatgcatgctaccttgcagatgttgctctttcctttaacttcatctgtatttgttctgcctcttatttgaaacagttgaatggcatgtttgtttgaagaagagaaggtccaatacttggctattaatagtctctctttaattaacataatgtagatgttattgtgaccttgaagcattaatgttaagtgaggatttgtgttgatgagcatatatgaatgtcaagtctttggaatccacttggtaacatggtttcttattattttttctagctccagaacctgggtatcaacccagcaaacattggcttcagtaccctgactatggagtctgacaaattcatctgcattagagaaaaagtaggagagcaggcccaggtggtaatcattgatatgaatgacccaagtaatccaattcgaagaccaatttcagcagacagcgccatcatgaatccagctagcaaagtaattgcactgaaag

SEQ ID NO: 398 - DNA, 499 bp, Homo sapiens
  source 1..499: mol_type = other DNA
tgggttttccttaaaactcttcctatgtttttgtttttttttgttttttttttgtttgtttgtttgtttttgagacggagttttactcttgtcacccaggctggagtgcaatggcacgatcttggctcactgcaatctccaccccccaggttcaagcgattctcttgcctcagcctcccgagttgctggaattacaggtgcctgccaccacaaccagctagtttttttgtatttttagtagagatggggtttcactatgttggccaggctggtctcgaactcctaacctcatgatccgcctgcctcggcctcccagagtgctgagattacaggcgtgagccaccacgcccagccagctcttcctatgtatttatgcaagtacaataactagggtttacctttttaagtatattgattaagtttggttaaagaaaatagatctgctaataccgaacttgatttaaaccactttaattacttttacttggaatgtatctgt

SEQ ID NO: 399 - DNA, 499 bp, Homo sapiens
  source 1..499: mol_type = other DNA
ccgcggcccccaacaaataaagaagggaaagtgctgagggtgacggccccggggagcgctgcggctctacgtcaacctgcggcggccgccgactcatttggggccacgctggttgcattcgtcacgccggcgatgcctctcaaacccgcggcctgccgaggacgttcccacacgggagaccccagcgacgcgggcgcatctgtggctctcgagaaccgggccgcggagccgccgcgagcgcaagcgaggaatcggcgactgcgggggtggacagctggggcttgtagtcccctcgctaccctctattctggaagaggcgggtcgcggccgctgaactccagctctgcgcctgcccaggcggccgcacgctcaggggcgtggcatgggtgggtcgtgagttgggcggggcccacagggcgtgcgcgacgcagcggcgcggcgcgtggcgtaaggggcgtggcgccagtgggcgtggcgtggcgcagtgcgaagggacgcg

SEQ ID NO: 400 - DNA, 499 bp, Homo sapiens
  source 1..499: mol_type = other DNA
tgagggctgccgcgggtgggtggtatcgaggcctgtcgggtcagggcggttcgcgggtgctgtcagagctgggccggggcccctaggcagggtagccgggtcgtagaggcgggggccggtcgcggtcggtggagcgggatgaggatgtaggaggggcggacgtggcggaagccgcggggtccgcggggtcggtgcctctagggagccagggaggcctttcccgaggctcctggggaagaagaggcgaagcgagagtccctggggaacccccactccactcccagctggagactgggttgtgtctgcatggaccagagcccacagtgcgagttgctataggcaaccagccagggtggccagctccttcccgtttgcccgtgatgttctggttttgggaccaaagcatcctaggcctccagcccactgcagtgaccgaattctgcgccccctgcccatcttctcccgcagcttccctagattaggcttgggaggcaagagg

SEQ ID NO: 401 - DNA, 499 bp, Homo sapiens
  source 1..499: mol_type = other DNA
gtgtgcgcgtgcgtgcatgtggggctctcgggaagctctgtatctggaggggtgtgttattccgcaccctcgctatacacacattttctagaccgtaagtgctgtgatgcactaacctctaggtgctagaaccctgcacggcactgagtaagtactccataaatgtctatcaacttagcaagttagtgagtgatgctctattgtggacccctgaggcagtggctcctgaaggaggacggggccaccggcagagcagggcactcagaggggtcccctgcccggggagcatgtgccagaggagggggacatccctaaggaacaggccagaggacctgagctctccctggctgctctggaaggcggaggccccccagtttatccagtccctagagcaccccaggccagatctggggtgcgcctggcttggaggccatgtccttgctgccgcctctcctggggcctgcgtctgctcccaccctgccgcatgggccttagcaat

SEQ ID NO: 402 - DNA, 499 bp, Homo sapiens
  source 1..499: mol_type = other DNA
ccaccagtgacttctgtgtggctcctgacaccttcatcctgaacgtcacggagggccagatcagcacaggtaactacacactctcaggctgctgctgtggatgcataggtggccggactctgtgcccctacttacctctttcagccctgtagccatccaacccctcctcaaccctgaacttcaagtccagctcatgctctaggccatttcctagaaagtgcctcccttgggagctcagggacggggagggaggtctggcttggccaccaaggatgatagagatctcatctggtcatttgtgagctgcctaacgttatgccgttgccctgcagaggtgactcgctactacctgtattgcagccagagtggaagcagccccttccagcaggtatggccccccgaggcctgccctcaccctgcccacagccgctcccccttgaccctaagcctcaccactgaccaagatggcggaggtggcagggccttgcttgcctcactg

SEQ ID NO: 403 - DNA, 499 bp, Homo sapiens
  source 1..499: mol_type = other DNA
gtgcgccacgggggccccggcgtccccatccacctgccgggctgggggctgggcagggccgggggtacgcgaacttggctcgtcgggagatggggggacgggcgggccccgagcgtaacgccaaggccagcgccggaacgggaccccgcggcctgtacctggaagctccatcccctggccctagtcccccaccctcagcctcctctcctgggaacacccctctccccgaagccgctgctgccaccttaggctgacgtgtgcctactccccgagccggcgacacagctgtccgccccctgtcccgccccgcggcgtccccagcttcgcatctccagcctcccgccgcccccacccacccatccaccgtccgctcccctccctgcccctcattgcccgcgggtcccggacgcacagtccctgttgactcaatgcaaacaaagcctggctggcgtccgcccgggtcggagaaacagctggtgtgcgcggcagcggcctcgct

SEQ ID NO: 404 - DNA, 499 bp, Homo sapiens
  source 1..499: mol_type = other DNA
aggggtcgggaccgcgagggactctcgcgctcagcaaggcgaggagctgctttcctggagtatggaaactgagtcagcgcctccctccctcataaccaagggcctgcgggactgtctgaacacgtgggtttgacaggtcagaaaaagggagaaccaagagagtggatgctcagaaaacatgaatgggaaagacagactgagaaggaggaaagtgggatggagagggccagctgagacgtgggccaggagccggagcggagatgaagggtgaggaccggggcgggggacgagctgcgaggagggttttgggccctggggactgcgtggtagcagcggaggcgggtacaatgctccgacgcagaaggaagagcgtcgaggctccgggtgggacctgagaaggcacccggcgtgcggcggcgctgggttggaaccgccgactccgcgggtcttcggcggcgggcgctgcaggtgcaggaggcggagccacgcgggggcgggg

SEQ ID NO: 405 - DNA, 499 bp, Homo sapiens
  source 1..499: mol_type = other DNA
gtaagacgaagttcgctcttttcttgaacgccggttgctccaaccacttaaccccacttgtctgagaagggtgttggcatgtttgttggattgcatggaattaaaacgggcgccgtagctcttcctttctgctgagaatgtggctgtggtatatgtgtgtttcttttttttttttttttttttgagacagggtctcaccctgtcacccaggccaaagtgcagtggcacaatctcagctcactgcaacctccacctcctggtctcagttggtcctcccacctttgcctcctggaatagctgggaccacaggcatgcaccaccacacctggctaattttttttgcattttttgtagacatggggttttgtcatgttgcccaggctggtctcaaactcctggactcaagtgatctgcccacatctgcctcccaaagtgctgggattacaggcgtgagccaccgcgtccgacgccatgtgtgtttcttaagtagtggtgccaa

SEQ ID NO: 406 - DNA, 499 bp, Homo sapiens
  source 1..499: mol_type = other DNA
agactgcagaaaagcccatcctgaaggtttcaagttttgtaaaagctgacctaggattgattgattcatttggactaatcagtaacatattacttctgggcttaagatttctcactgtcataggcacacctgggaaaaggtctagtcagaccaccaatttttgtgcagggagttttgccacttatgtttaagagcacgttctggttggtccagtggctggcggagaaggtcggtgtacaggtggccaggaatcctgcctctgcgtgttgagaggagtttcttattccactgtcctttcaggaatcatcttagccttgaatatagatttatagaataaaagtgtaaatagcaaaatatattgaaggcttcctgtttggagacattttgccctgcccagggagaatcatgagagcttctccttcagagattagtggtctgagtcattgcagtgtgggcgtcgtaagaaaaacacaactgacttaagtcccgcccttcaaat

SEQ ID NO: 407 - DNA, 499 bp, Homo sapiens
  source 1..499: mol_type = other DNA
gtaagcagtgcggttctgcagccccctcctgtccctctgaagcttggtgggtgaggttccctggggactgactctcagtacctactggggagcctgagtcagaggggacatgagttttctcggggtgctctcaactctctctgctcccttcaaggccactctgtctctgagcttatccgcagcacctgcccaggctagagccctggatacaccccctaggctcgcccggcctccctgccttgctgtccccactcggccttccccactgtgcaggccgcagcttcgtctgttcagtagggtctggtagaggggatgttcgaatgtaggggagaaggtggagaggctgtggggagcccattctaagactctgctgttgacaaaaggaaaaagggggccttgtagaaaccacccagggtgggtgggggcaggaggggacagggcgctggcatctcactcttttcctgccagcttttctgctgacatgggccagctccatccc

SEQ ID NO: 408 - DNA, 499 bp, Homo sapiens
  source 1..499: mol_type = other DNA
tgctggttggttggaaggtgtcctttctgcccctgcccccctcccaaatccttctctcgtgtctgcctgctctcctaatcaggctcgctcagctggccttcagagggtagcaagtgtctcagggcccgctgggcgtcttcctgctggccctgccctgggactggagctcagggggttggcctgtaagcaagagcacctttctgggtcattccaagcactgaggtccctgggccctctcctcccgtcccattttgggggcaaggagcctgtgggcagcctccagcctgcagttctcagctctctactttccagggtgttccctggtcctcagagggtcccgcctgctgtgtcttgctatctgtgttttggctgtcgtggggagaggtctgcttaattcgggttgacatgccgtttctaacctgttttttgcactttgcatctttctccctcctttgtctctccctctgtcccctctgtgtgcactgcctttcactccgta

SEQ ID NO: 409 - DNA, 499 bp, Homo sapiens
  source 1..499: mol_type = other DNA
cagtcttctcccagacactcccccggctctggcctggcgcccggagaccagtagcagcagctccccacggccgttcactgtgagggtggggagggccgtgggaccaggaggccttagggggaaagttggccatgaggagtgggaagcgacgggtcagatgccagtgactgctggctggggagccgctggacgtggctggcctgtttggccagtgtggcgggtgccccggggcttcagtcacccccagccacgtgtgggggtgcgggatgggaaaggtaagagtgtgtggagcccagtcagcactcaacatgaggtcccgtgggggctgcctgagggcgtagcttccagaattcagcccctggccctcagaaggtgtcaccaaaggcttctttccatttgagtgaatccctcccagcccccagcaagccctcggaacgagcccactcccaggcgctctctcctagtgtgggagtggccacgcccctgctgggagtgactc

SEQ ID NO: 410 - DNA, 499 bp, Homo sapiens
  source 1..499: mol_type = other DNA
tgagctgcgcccccatcccctgcccctcctctcctgctccttctcccttccatggtcccagccagcaagcacctggggtagaggggacaaacccaggtggctgtgttccagccctggctgcaggtctgaatggctttctggggtggctggccatgctccctgagagcccagctgtggcgatgtctgagcaggtaggtgggggagcacctaggaagcaggggtgtcaggcagagcacaaggagagagggtgtccaggtcagtttcaggacctggctgagaggagggggctcctcacgggcaccgcctctggcaagcacagggacaagggcaaggacggcatggccagaggtccctgggagcctcttcccctctcttcttcctagcagctccccctcactcttcccagggaccctgtcactttcctttagcgtgtggcagctccttggcgtccctcccgtgccttcaggttgcttctgcgccgggcctgccgctgggcgcc

SEQ ID NO: 411 - DNA, 499 bp, Homo sapiens
  source 1..499: mol_type = other DNA
ggcctgcgccccaccgccgcggccgccctgggagccggcccggccgcggccccggcccccgccccggccgcctcgctggctccggttcagtttaatgatgtcgtccagagacatgtccattttgtcggccatggcgggcgcggaatcgggcatcggctcgagcccgcgcgtcagcacgccggcacgtcacttccggcgccgcgtgaggccttccggtgccacggcctcggagcggctgctgattggccgctggcggacggctgcgcgcgcgggacggggtgaggcggggaggcgcgtgcgcactggcgtgcgagactcggcgggcgctgttgagggagtcgggccgcgactgtggtcgtttttataccttcccgcgcggacgccggcgctgccaacggaagggcgggtagggcggtgcgtgattaggttggcgaaggtgcgagggcgcagggggtggggcggcggccgttggaggcggagcctacgcgcccctccctcc

SEQ ID NO: 412 - DNA, 499 bp, Homo sapiens
  source 1..499: mol_type = other DNA
ttggttttttggtctccacctgcagcccccccaagtctgcactgtcacattttgccagtcatatcctttacaagttttcttgcgggccgggcgcgggcctcacgcctgtaatcccagcactttgggaggccgaggcaagaggttcgcttcagcccaggagtttgagaccagccggggcaacatcgtgagacccccatctctaaaaaaaaaaatgagctgggcatggtggtgcacttctgtactaccagctacttgggaggccgaggtgggaggattgcttgagcccaggaggtcgaggctgcagtgagccgtggtggcaccactgcactccagcctgggcgacagagccagaccctgtctccaaaaaaaaattatttttgcaacttattaatgaaaaccagtgtgccatttcattgattttttttttttttttttgaggcagtctcattctgtcgcccaggctggagtgcagtggggcgatctcggctcactgcaacct

SEQ ID NO: 413 - DNA, 499 bp, Homo sapiens
  source 1..499: mol_type = other DNA
tgtcatataaatgtagctgggtacaatggctcagacctctaattccagccactcaggaggctatggctggaggatcacttgagcccaggagtttgagaccttgctgggcaacacagtgagacctcgtctctttttttttattttttgagacggagtctcactctgtcacccaggctctgcagtggctccatcttggctcactacaacctccgcgcctcctaggatcaagcgattctcctccctcagcctcccgagtagctgggattacaggtgcgccccaccacaccaggctaatttttgtgtttttagtagagagggggtttcgccatgttggctagactggcgaccttgtttcttaaaaaaaaaagggctgggtgcagtggctgacacgtgtaatcccagcacttcaggaggctgaggcaggctggtcacctgaggtcaggagttcgagaccagtctggccaacatggtgaaacccccgtctctactaaaaatacaa

SEQ ID NO: 414 - DNA, 499 bp, Homo sapiens
  source 1..499: mol_type = other DNA
tgagactccatctcaaaaaaaaaaaaatgcaaccagtgtatatttcatcatcctatctctgtgagcttgttatacacaaaagttttctgtttgtttcatgcaaagtaggccaaaaaagtttacagattttccacatgggaaaatcatggagagattgtttacataaatcccacagttcaagggcagaaagaggaatggaaagaggagttagaattgaattctgcttacgttttattagtgtttcattttattggcctcactttgccctttagatggactcctgctgtgtgtgatggagatttcataagagggaggtcacccagggtcactaatgtcaaatctcctgcaggggaagaaaagttcctgtggccacctgtgtcttttcagtgtcttacttcgtttgtctgcaggtgaaattgctcaaataatggagcaaggtgacctctcagtgagagatgctgccgtcgacactctgtaagtggcttctctggggagagtc

SEQ ID NO: 415 - DNA, 499 bp, Homo sapiens
  source 1..499: mol_type = other DNA
gtggccatttgttttcgtccttggtgtttctgaatgtgcccatgtgcctttccttaccctttttttgggcgtgagtgtgtggttgcatccagctggctttgccttcaacatctcaaaggtgtcttcacttattgtcctttgtgtctgcttggcatatctgtcacatgcctttagttgcatctcaagaatgtacttcactattcgaaaggcgatcatattgagaaattttaatagaattaaatatctaaaagcattatgtctcaccagttgagtctaagaaagcagccaaaaccaacgtgaatgcgctgcaatgctttggtttttgttttgttaattgcactttatcctgccttccgtttgttttgcggatgtcctgaagcagcagcgcaggttcaagtgcatgcaccaggggcaggggcaggcatcagagatttcagtgggagaaatgaaagctaatttatatttttcgtcagtgtttctggttataagcacttgctgc

SEQ ID NO: 416 - DNA, 499 bp, Homo sapiens
  source 1..499: mol_type = other DNA
gtgtcactcattggggccacagtttgcaattccagcatgacagtttttgaggcagtccccttccaccccaaacctttccgtttctcttgctgcttggctttatgttgagagcagccaacccagcttcttaattttttttcatggttaaatcaataccgcagtgcaaagtcagcattaaaacactttccattttatttccagctccctgttcccaagatgtgatagtgctgctgtggcttgcaatgaaggggaaaaaatatatatatctgcttaaatcggcgccaccctgatcctaataaccgtctctgctttaccaaacaagagcacctggttttctattttatttcccattcttttcgtttccaaactctgagattccttcgttcttcctcctccctgtctcctctgcctacgattttgtctaacaagctgtgaatgtttatgtgcctgagtttgtgtctctcttttgtgcttgactctgcctctctttgttcactca

SEQ ID NO: 417 - DNA, 499 bp, Homo sapiens
  source 1..499: mol_type = other DNA
gagatggccgcacggtctctagcccgcagggctctcagagtcgcaggcggtgacgcccggtcggggggcccggtcgcaagggacacacagctgggggcgcaatggtgagggcggcgacgcacggtccggaggggatgcgcggccgggtagggcgtgcagggttgtggggcgtgggggacacgcggggccgggcgcgcggtcggggggcgcaggggcaagagggtgtcgcatttatcagggaagtccccggccgactctggcggggaactgggcgcgccaacccgggtcaccgccctgcacagcgggagaagtcacccgcattgacgttccctaggcgctggatcgccgaaggtctggttgaaaacttgaacccgcctggagcggatgcctaagaaaatgcaggcccgctgaagcctccccgccgggccctgggccctgaaagcctccggcagtttcccgtgaccccgcggccgctctgcgcgttttccgatttcttgct

SEQ ID NO: 418 - DNA, 499 bp, Homo sapiens
  source 1..499: mol_type = other DNA
taagcaccgtaaagacggggatctttacgggttttcctcactgacttctcccaaaagctaaaccagcgcctggaatataaacatgtacataatttgcaggtgttagttttagcgtccttccggattcatttgtaacattggtcccttccctcactaaggtaatgtctcaagtaccacactcatcagagcatgtggaatgaatatcacagtggtaaaattgaactgagggcaattagccgtagaaagaaagaattccgcccccccaacctattaaatatgcaataaaacagataattcttaatcacccattggtagattaatttaatcgataaaattccactgaggctagtcctgtgtgaaagccctacagagtgttgaaagcatcaaccaaataggcaatgtatattaagttccagtaaaccttttacggcagttttatgtaaaatgttagaaatcacgctctcaacaattgcatcttgcggtagaaactacaacagtc

SEQ ID NO: 419 - DNA, 499 bp, Homo sapiens
  source 1..499: mol_type = other DNA
taattcaaatttcctaccaaagaaagttaaccgtctcttgaggcatttgaattatttagaactgttttcagataatttgcacatcttttttagggccctatacacctgcctcaggaaagaaaaaaaaatctgtttgtcagatgtaggcaacaccactcgttaagtaagccattagtcactctattttttaaaaaataacttaattatctcatccacaccagttttccattctctgcccatcttcctttcttttttcttcctctcattctccgtgtctctgatattcgctctcttcccactggacaatcagcattcaccccttgtgcttctgagtcttccagtgagctgtgctggtctcctggagacagagagcagtttggggtaaaggcaagtctgtttggctaatttaaattcttgtaatgtgagagatgggaatagaaagagcaaatggcattacagagatttttgttgttaaaaggacacctcttctccatcccat

SEQ ID NO: 420 - DNA, 499 bp, Homo sapiens
  source 1..499: mol_type = other DNA
cttccatccggttgagtgttcctactgccacagtgagagtatgatgggatttcgctaccgatgccaacagtgtcacaattaccagctctgtcaggactgcttctggaggggacatgccggtggttctcatagcaaccagcaccaaatgaaagagtacacgtcatgggtaaggcaaggtccaggcaatacttggagttggatgtgtgagtgttgcccagagttaaagggaatatcaaggatggtggcagaattaaagggcaaacttaccttccatcccaggtctagtattcagtcccccttcctcccactctccaccctactgcgtgctcttacttattctgttggaacccagtgtagcttcctgagatttaaaatataggaagactcaaaactatgttacttcttggaatatagataattcagtactgatttaaataacaactgaatagcaaggaccttctggaacataatcttacattcacagtaagttaaaatcttt

SEQ ID NO: 421 - DNA, 499 bp, Homo sapiens
  source 1..499: mol_type = other DNA
agcctgcactccattttccaaatagaacccaaatatcaacagcatcaacaagcagatttgaaaccccccaaaaacacgctattattaaattgttaattgtattagaattgcctagtttaattagtaatattcatgacaaaactagtttgccccttatcatcaatcgtgctccaggtaggagtacaaacactgggtgtaaaaagcagatgcaccccagttggtgtgcaagcccccgtttgcaggtaattaattcacagtgtggcggcgccttttcaagccccctctgcaagccgcgccggcctcctccctctcgagcggggtcaaaccacttagtttatttcacccgctggcactttcttccctgtcacgaattcagcctggcttcctttggcctgagacagcgtcttcaggcgggtcggctcggacctgcccagtggggcgcccacctgcacccgcacccgcacccgcacccgcgggaaggggcggcgctggccggact

SEQ ID NO: 422 - DNA, 499 bp, Homo sapiens
  source 1..499: mol_type = other DNA
tgagtcaagtgcatttaaagcggtaccgccctggcgcaccccgacaccccctgcactgaagcagtccctcccaggccaggggctggctgcgcctcctcctgccgctgaggtctgcagcccgcggggctcggagcaaccggaaccgggggtccagagtctagcaagaagttgtgcaagggtcggctaggcggtctccgggtgtgcaccccgccgctctcccgcgggccacatctctggttcggtgccccagctctgtgcaccccaggaaagtggagggagggagttggggctgccacgctggcagaagcgaagtggactggttctgaggggtgaggctggggctgtccagggtaggaacacggcgttggtgaaggaggggggctcgcgactgcgcgaccgcggcgcacgaccctccaggctctagctggggcgccggcactgagagagctgggggctctggcaggggctgcgcgcttgggggcagatcaggaagtgcagc

SEQ ID NO: 423 - DNA, 499 bp, Homo sapiens
  source 1..499: mol_type = other DNA
ccactccttgtggaacctcaagagggtgtctcagcttcccaaccccattagggattggtccttccttctgaaggctcccatgtcacttaaaactaggagcaaatcaatctgttatgcctcttctccaattcaactgccctttgcaagctgattttgcagcgaaccttcagagagctgggaaaactctaccctcggcccctgcacagccctaggaagctaatcctcggccgtaacattccatcacaagggcccacagccacagtgtgtgggggcctgtcatgtgagggggctgtcacctgagggggctgtgccgctggctcagctctgcctgctggccggggccctactccctctcagagatgacacacaagtgcccccaaagaagaacccgaggagtcgcaggctgggccaggctgctggcttccagtgacatcacatgactttggggccactgcctcatcccgtatctgcgcgtatgagatgcattgtctcttcctct

SEQ ID NO: 424 - DNA, 499 bp, Homo sapiens
  source 1..499: mol_type = other DNA
tgagtaggacctcctccatcagagtccgtgcattgggtgccagaattccatttgtcccgggagcatgtgcgttaagcccagttgggcagggcaggcacccagcgtggccccagatgctgctcctcatggtgttcttaggtgctgtcttggccgaggaatgtggtatttggaattatattttatcagtaatgcttttgggtagttgtgtgttcttaacaataattaaatggcattattgtcaagtagttcatattcaaattgttcatgaactcagtcttcttaaatcaatttttttctgtactttttctctttaaaaaaaatgagtttgcttcctggaagaatttgcctaaataatggtaacagacagtgtgctgtttgtcctggtcccaggttcccgacttaagggctagtttgcaagagctaatcaccgggctaaatcaccccaggcctttctcggcgaggtttccatggttcaggtgcaaacctgagtgtgggtgtg

SEQ ID NO: 425 - DNA, 499 bp, Homo sapiens
  source 1..499: mol_type = other DNA
gtgggaagaggccggcgactggggtgaccgcggggaaactgaggcagaggttgagccagaccctgaagccttggccaccgtgtttttgggcggagggagggtcagggcctggggcgagctcagaggggcgggacagggcgggcttccccgggagcgggaccgcgacgggtgcgtacgagttcgctgggcgggaggagcagcccgggcaagggcggagaggtggacgccccggtcagcgcccccttccccgccttcagagatgggctccaaggcaaagaagcgcgtgctgctgcccacccgcccagcgccccccacggtggagcagatcctggaggatgtgcggggtgcgccggcagaggatccagtgttcaccatcctggccccggaaggtagggggagcccggtcccggggaaaagcggacctgagaccccggcagcaaggggacgggagagaagcacacccctaactcctgaccccacgccctgggaacccccgcaa

SEQ ID NO: 426 - DNA, 499 bp, Homo sapiens
  source 1..499: mol_type = other DNA
atggtatgtaaactgcatctcaataaagcccctgagagaggaaaagggccctctgctctttctgccttcccaggcatcagcggagaggaaaaggtgacctccagcaccgtccccgaggtgggaggacccgccttggccggaagtggaggcgccgcgaccgccccgcccccgctgtgttccggccgccgagtgctcatgcaccaccaggctcccttaggtggacagcaattttgtgctcccgtcagccacatgggtggcgtgtcccctagtgccgtgttccccttttcagaaagacgagcctcggatgcttttctacccagccagtggagcctggactcgaactcgctctcatcgtagcgcgtccaggttcgggttcgcctgagaggctgagatccgagtctcaagggcactatccctttaagacggggcggagccccgcgatgagcggcgggccggcgggagaggaggccggaagtgtgtgtcacgtgttcggggacgg

SEQ ID NO: 427 - DNA, 499 bp, Homo sapiens
  source 1..499: mol_type = other DNA
tccctcctggaatccttcctagagctgtctgggatttcctgttagaaaccacatctttcaaataaggaaaaccaagactcagggagtgacagaccctgccctcagccccgccgggctgccaggaggccccagtcatagcagtgttggttctgacttctgtcttgtcctccaactgtgctctccaagctatgacctgtgcctgaccagggggctggccacaagaggagagaatctggggtcccatccttcctgaccacccctctctcactcccctcattaggaggaactgggcaagcccccttatggggaaagaaaaaaaacggttctgcactggaaaattggccagtggctcccttttcctctcccaccccccaaacctctcagtgccctcaccctcagacaacgacagctgacaacaggcagccagttcaggccagacccctctcacttctgcccctcttcccgccaccgctcccccccaccccgcccccagaagcca

SEQ ID NO: 428 - DNA, 499 bp, Homo sapiens
  source 1..499: mol_type = other DNA
tgcgtggctgggtggcctggggagactgggtggaggggaggctcaggatgggctctctggatcgtggagagcttattttatgtgtgatcacaggaggggactggggcaccagacagacccttcccagtcctccagacctccacctgcttggggaagtctgttctttttatgtatttatttattttgagacagtctccccctgtcacccaggctggagtgcagtggtgggatctcggctcattgcaacctccacctcctggggttcaagcgattctcctgcctcagcctctccagtagctgagattacaggtgtgtgccaccacacccggctaatttttgtattttcagtagagactggtttcaccatgttagccaggctggactcaaactcctgacctcaggtgatcctcccgcctctgcctcccgaagtgctgggattacaggtgtgagtcactgcgcccggtggatatctgtcccttttcaatgcataatgctggtt

SEQ ID NO: 429 - DNA, 499 bp, Homo sapiens
  source 1..499: mol_type = other DNA
gtaagttcatgggaggggcctgagaggagacgggtgagacagacgcgtccgagcaggttgggagaaagggcttctctgcgaggcttctctgccaggtcactgtgccacgtgggttacggaactctccttggtgtagggctcaacagggtggagccacgagtccatgagctcttcgtacttgcacagccctaggcctggcatggagtggccagggcgaggctggttctgctgtccgctctccccagggtcccgccacgagggtggcgtggcatggggcacatcgcccggacttcctgtccctcttgggtttaggaatgggatggtgaggcctccctggcagcttgttaggaggagtaaaccaagcgagccgaccagctcccagcagggtcctggcacacagtaggtgctcagcaaacgaagctgtgacctgagggtggagagtcttatggcagggagggagggaggatgtgacaccccttgagtctcctcaattcctgag

SEQ ID NO: 430 - DNA, 499 bp, Homo sapiens
  source 1..499: mol_type = other DNA
ttctctccctgcggcagctctagccctttccagacccccatcctcctcccactcccccggagaacattctgggcagaaggtgcagacagtgcaggggcctgcagtggggagcagctggggtgtgggaagaactgcggggagcccaggggagacaggccacgggagggcagtgggccaggctgggaagggctctctggccaagggaagctttaggattttgcagtgggagggcgttgtgcagtggagtgatgctgacgctccctggctgaggttccagaagggtccctgtggctgcccaggggggcagggtccatggctggttggggtgaggtgccctgggaaatggcattttgttggaaagacccagatatcggatgaggccggggtgggtcttcatgagtcatctcctcttccacccaagatgctcagctgtgggaggactagataggcaggggtgggacgaggagggagggctgcccgggtatgtaagcagagccag

SEQ ID NO: 431 - DNA, 499 bp, Homo sapiens
  source 1..499: mol_type = other DNA
gtgtgtgtaggggcctgtttcggtggggcttggttgggtctgattgggggaggccgcactgaaaagttgagcggggtggggggaggggagctcgttgggtcctgacagggaggggcgtcagacttcggcctagagggttttcttggatctgacttcgaggcgttgctgggatccgttgaggggaatgccccggggggtgtttacccaggccgaactgggggaggctgcaaggatcggaccagggggttactgacacgaggtggtggggggctcggccgaacttgactgggagaggcaacagagatccgtcagcaggggttactgctgacagggtcggagggaatttcagggagaggcttggccagacctgattggggaaggcgactgggatcggtccagggggctcctatagtgggttggccgggcttggctggctctcattcgaagaggcagcagagacctacctggggactgctttgggcctgattaaggggaatcc

SEQ ID NO: 432 - DNA, 499 bp, Homo sapiens
  source 1..499: mol_type = other DNA
gaggaccggctggctagagaggccaaagaaacggcaactctttggtcacgtgaccggaccttgtctcagcccgggtttcccaagtgccagggcacgtgtgaaggttgaaccttccgattggctcggcgggaccagtttgaacggagtacgggagccgcggcggctcacctacggccgcgtttttcttttttttttttctttctttcttttttttttttttttttttttttaattctctctctttggctccctccttccgcgcgagtctctggagaagccgcagcgcgagttgccgccgctgctgcccggggccgggtaagtgggcctcactcagagcccgaccctcttggccccggcttgcgtcgacccccgccgggcaccgagcctgcgccgcgcgcggcccgggcgtcggggccgcgcccgaccgggaaaggccgggaagccggttgggcccgatcctcctggcagctagaacgggccgggcgggggaggggggaac

SEQ ID NO: 433 - DNA, 499 bp, Homo sapiens
  source 1..499: mol_type = other DNA
ttattatttaaacttcaaacaagcaaacaaccaaaaaaaaaaaaaaaaaccaaacaaaaccgagagagcccatccttctgtcacctgactgagtgggaaaaagggtgaaggggttgtgggaggctggggaaggggtcgcaagaagacccatgtagcttttaaccctaatgtggccgagacaagcaccttatttgtgctaacaagaagtgttttgttcattattactgtgattaacattagtattggtgtcgataacaaagctgaaatcacatatttaggatttaggtctgattaaaaaatgttggggtggatgttccaactggatcaggagaaaagaaaatgaaaacagcctggggagagggaagcctgatctgtttcctcactcgcttgctcgtggatgtcattttctgtcttcttgggggcggccaaaaatcgaccggtgtcggggaccagaggcggccccgcacgcccccgcgtgtgcgtccacgggcgtctgtgc

SEQ ID NO: 434 - DNA, 499 bp, Homo sapiens
  source 1..499: mol_type = other DNA
tgtgtggacggcaacgttgtctgtgcgcgtgtgtgtgagtgagtgagggagagagagagagaataggtgtgtgtagaggctcccggtgcctctgtctggctgctgaggctgagatgggagcaagtggctggcgaagctggtggtggcttcaaaccacactttcgtagaacaatcgcaagagaaaattgttggggggagggaggaggaggagaaggcggttttccttgtgcccccccttctaacgctgcttttctccttctctctttccccctcatcccgtcttcccctcctcccgtcctccctcgccccgcatgctcccggcttgccgcctgcaggatgagttccacccgttcatcgaggcactgctgcctcacgtccgcgctttctcctacacctggttcaacctgcaggcgcggaagcgcaagtacttcaagaagcatgaaaagcggatgtcgaaggacgaggagcgggcggtgaaggacgagctgctgggcgagaa

SEQ ID NO: 435 - DNA, 499 bp, Homo sapiens
  source 1..499: mol_type = other DNA
gtaagtgggagcagcacaccttccaaaagcctctgagccagagatccttcgtacatccagggtgctgcacaaagaggtcagatagcgttctagactggggtgtggcagcccccactttcggaagtgagagaaccatcaggtttggggttgagtgaggtgctagactggaagggatgagcccatttgttgggaaatacctgcagtgttggacaaaaaggcatttgtgaggccgggcacggtggctcactcccgtaatcccaacactttgggaggctgaggcgggtggatcacctgaggtcagtctggccaacatggtgaaaccccgtctctgctaaaaataaaaaaaaaaatagccaggcgtggtggtgcacacttgtaatcctggcttctcagaggctgaggcagaattgcttgaacccgggagttggacgtttcagtgagccgagatcacactactgtactccagcccggctgacagagcaagactctgtctcaaaac

SEQ ID NO: 436 - DNA, 499 bp, Homo sapiens
  source 1..499: mol_type = other DNA
atgcaccaccacacccagctagtttttgtattttttagtagagacagagtttcactatatgttggccaggctggtctcgaactcctgacctcagctgatccacctgcctcggcctcccagagtgctgggattacagacgtaagccaccatgcccggctggaatcattcatttcttttcaagtgggtatcttatggtattttagggcatggctgggagcagttttgttttctcttctcaagactgagtgtttgcaggatgtcatagagttcatgtctgcagctcacagtgtcattgcctgtgtccccagctccacgtactggcaggtgtgctgcaagctgggtaggtgccctgtgtccctgggataccttaaccgacactcctggccctcctctgcaagctgtgccctgatcctccctgcagggactggggattgggtctgctcacctagaagccaggatacctggctgagggcacttctctccctcttctctttgaaca

SEQ ID NO: 437 - DNA, 499 bp, Homo sapiens
  source 1..499: mol_type = other DNA
agatggggcttgggaggatgactgaggaacgtgtgtgtgctcgtgtgcatcttggctagaggcaaaagcggggtctggttgactccaggcgtgatcctagccccccacccctgtgccctccctgcctgaggtcaaggtgtctgagcccatctgtgtgccatctgtgtttgtgggtgtcagggcaggggacagaatcagggtcaggtaagggaagagaggcccaggcagtgacaccttcccctccctggctacccctagatcctgcgctatgagaatgaggtgttgcagctggaggaggatgagcgcttcgagggccgcgtggtgtggaatggcagccggggcaccaaagacctgcaggatctgtctatcttcatcaccaatgtcacctacaaccactcgggcgactacgagtgccacgtctaccgcctgctcttcttcgaaaactacgagcacaacaccagcgtcgtcaagaagatccacattgaggtagtggacaaag

SEQ ID NO: 438 - DNA, 499 bp, Homo sapiens
  source 1..499: mol_type = other DNA
ccgcacacccctctgcactcctgccccgggggagccgcgctggcctgcagtctcactcaacacctctggggcgggcctaggggtcctttctaaagctctcaggtgaggcagtgaagggccacaggtgcggggcccaccctctgagcagcaagggcctacagcgcttttgaacgtctcatcattttgcctcagccaccctggaccccttttctgagggaggtccgccccttctctgatccatcttctgctcagcatcaattgcaattgtccagcgccctgtggccactggcttagagttggggaaacagcccaggccttgaagcagctacaagccgtggcagaaaggtctctcagggccacggcacacacatcctcatgggcaacacgcactgcccatcttttctgtgagatgggtgccggcctcagtgccttacacggagtcccttagtgaatcctctccccaccctctggggtaggggctcttcctatccccatttta

SEQ ID NO: 439 - DNA, 499 bp, Homo sapiens
  source 1..499: mol_type = other DNA
tgtatggagtatgcaagtctcaaatatctccagcctgcactcattcattaatgcatggaggcactattctaggtactggagacagagcagtgaataaaacattcaaggtcctgaaattcatggaatttatattctgatggggggaggaaacaaaaaaatcagagtgtgattcatgctgtgaaggaaataaaacagtgtgaaagagagggtgggagtggccactgtagtagacagggggatcagaagaggcctcttttgggaggtgacagttgagcctgataaccagaaagatgagaaggcaccagttgtgggaagatctgggagtggaacattctaatctaagcattgttacatgcagaaaaaggacctctgcaaggtggggaaatttatcacagatatttattgagggcctgctatgtaccaggtgctatgctaggaattggagatgtagcaatgaataatatagctacagtcttcccttctctcatggatcttacag

SEQ ID NO: 440 - DNA, 499 bp, Homo sapiens
  source 1..499: mol_type = other DNA
tgagcccagatctgattgatgagaaggaaccaaccttgtgacggtccggggaagagcatttcaggcagagaggtcagcaggtgcaaaagccctgccatatgttcagggaatcgcaaggaccagtgtggctaaagcctaagtgagggagaggggtgagggttggaaaggctgacagaagccagattacttgcagcctaagggccacagtaaggagtttctattttcatttaaggggattgggaaactattagaagggagtttttaaaagcaagacagcgacatgatctgattaatttttttagaaagctcactttggtttctgggaggaaaacagagggtcaggacagaatcaggaaggaaagttaggagacaatccatttgtccagatgagaaatggtgacatgaatgtggtggtggtggtggtagtgaagatgtagagaagcagatatattttgggtgtacagaaaacaggacttgatgatgggattagagaaagaga

SEQ ID NO: 441 - DNA, 499 bp, Homo sapiens
  source 1..499: mol_type = other DNA
gtatgtagtaggctatactatgtacgtttgtgtaagagtactgtatgatgttcacatgatgtatatctcagaatgtgtccctgttaaatggcccatgcccgtatttatgtaaatacaccgtataacacacacacacagtgtagggcaaccaaactggtgccatgggagccatccttcctttcccctgccctcaataccttgagcttagctgcccttattcaatctgtatttattcccatttactctaagtattgatggggaaccaagtcagaccagacccctcactggggggcggggaagtgggaggtgtgtctttaactgcatcttccacttctctctcccaaattcaccccctgcagggtccgccttagtaagcgccgggccaaggctggggttcagtcaggcaccaacgccctgcttgtggtcaaacatcgggacatgaatgagaaggaactggaagctcaggtaacaagcaccactggctcagggcacccatggc

SEQ ID NO: 442 - DNA, 499 bp, Homo sapiens
  source 1..499: mol_type = other DNA
atgaatgttttaaatgaaatgcttaaacccatgttcaaaaatgtgactccaaaactcttcccttatggctcaaagtttactgctatgccagcacctctggtgtagagttgggaagtcttgagtttctgtttaaagcagagattacaagaactgtgaccccataggccaggcaggaaatgtaaaagagcagtggctggtagcatctgagtgacctggagttctgggcaaccatggagggcactattcacttccagcccactgttgctgtgctgtggggccagaaattcctatcttccaaaagccccaaatccaaatgatttgacatctcctggtttctcaaagtgttggtaactaactgacacatacagtaatgcactgcatgtttcagtcaacaatggactgcttatggtggtcccttaagatagaataccgtatctttactataccttttctatgtttagatacacaaatacttactattgtattacaattgcctgca

SEQ ID NO: 443 - DNA, 499 bp, Homo sapiens
  source 1..499: mol_type = other DNA
ggctcaaacatagatgtcacttgtcaccagcctggccaacacggtgaaactccgtctctacttacaaaaaaaaaaaaaaaatgggaggctgacgcaggagaattgcttgaatccgggaggcagaggttgcagtgagccgagatcgcgccactgcactccagcctgggtgacagagcgagactccgtctcaaaaaaaaaaaaaaaattagccaggagtggtggcgtgctcctgtaatcccagctactcgggaggccgaggatgcagtgagccgaggttgcagtgagccgagatcgcgccattgcactccagcctgggggagagtgaggctccgtctaaaaaagaaaaaaaaagagagagagagacgtcacttgtccaggatatcttatccagtcagtagcaccacaagggttagaaccctggccagacatccacccaatttcacgggtgaacagttaacagcctctgagagtcttgtcctctctgggcctccgtaacacc

SEQ ID NO: 444 - DNA, 499 bp, Homo sapiens
  source 1..499: mol_type = other DNA
tttggaccactgagggaacgcgcatgcgtgctaggcagggcagtccgaaggcttgggggtgtatcatagggtctcatcggaggtttgttggccgtaagacccctggaattggaactctaaaaacacagaaaggatatgagctcaggagacttgaacgaaagagttgtcttaggaagaggggtcagaagacaagggtgctgggcaaaaggctagttcttcgaatcagaatacggtggccagaaaggttcctctgacgaaagaggggcgtggttcgaagccgtacagtggccggtaaagctcaagaaacatggaacgaaaaggacgcgaagaatcggcagggagaagcggacaggatgtcccgaaaggctcatataaccgaaaaggcgggttaatgtgaagggacggaagggacagaacttgcgggaggcacatgctggccgagaaagtcctggagttcggagcatacagtgtttttattaggtggaaacaaacgggctgg

SEQ ID NO: 445 - DNA, 499 bp, Homo sapiens
  source 1..499: mol_type = other DNA
gtatctaataaccctctgtgtgtctgtctctgcagaaatatcttcccttccaacctggtgtcagcagcctttcgctcagtgagtcctcaggggtgtcctgaggggatgggggtggacagggagggatgccagccagggggagcccttgctacctgattttggttagttcctggaaaaatgcatgtcaatgagaatacgggctcagagcctcctgtgagttttaattctagctgtgtgactctgggtaaatgtgtttacctctctgagcctcggttttccacctctggaaaatgggggtattgatcatcctgccccatggggttgccagcagatgaaatgagatcacattgaaaggatgtggaagggcaggctttgagcattgttagcttggcatggggttgggaggccctggtaacgatggacactgactcttcccaaccccacctacagtactctaccacctatgaagagaggaatatcaccggaaccagggtgaagg

SEQ ID NO: 446 - DNA, 499 bp, Homo sapiens
  source 1..499: mol_type = other DNA
gagagagtctcactcggtcccaggctggaatgcagtggcttgatcttggttcactgcagcctcaacctcctcgggcttgagtgatcctcccacctcagcctccagagtagctggaactacaggcacatgccaccatgcctggctaatttttgtattttttgtagagacacggtttcgtcatgttgcccaggttggtcttcaactcctggctcaagcgatctgtctgccttggcctcccaaagtgctgggattccaggcaagagccatggcgccttggccttagctactattttcatcttaaggcagacactgtcacacaagagtaagggtagccttgtaaacacagatgcatattcatgagatatgaagccgtcccttttctccctccccgccaccgcctcccaacacacccagatcctcccccatactctcagagccgctggcaggccctccaggaggaagtggctgatgcaagctgtccagggtattaagtttgctg

SEQ ID NO: 447 - DNA, 499 bp, Homo sapiens
  source 1..499: mol_type = other DNA
gagaggctgaggcaggaggatcccttgagcccaggaagtggaggctgcggtgagccatgatcgccccacagcactctggtgtggacaacacagcgagaccctgtctcacaaaataaagtaagcccggactgagtgcggaaaggcgggcctggcgggtctggtctccccatgcgggccaccagaggccctgcagccttcagtcgcttgaaggggtaatggcgcttccactcacaaacatggcggacagagcgtgtgaacgagatgaacagcccctcaaaaatatggccgccgaggctggacggccgtgccccagcagcaccgcctccgcgccccacgtgatctctcgccgggcacagcgctgaccgcggaggtccaaccggaagaatgtccggattggacattcggaagagggcccgccttccctggggaatctctgcgcacgcgcagaacgcttcgaccaatgaaaacacaggaagccgtccgcgcaaccgcgttgcgt

SEQ ID NO: 448 - DNA, 499 bp, Homo sapiens
  source 1..499: mol_type = other DNA
ttttccaagcggctgccgaagatggcggaggtgcaggtatgggctccgcgcgggccggggcggcaaggggccgggtgggatccaggccggaatggggtcgcaccctctctgtcttgcatgttttgcggagcttaacatccataatgaagcaaaatggaagtcttttgggataaggggaatctgtaggaaatgccgcggctctctttaggcctagggttggctacaatgtggcatttccttctcgaggcgagggtgatagagcttccagcacaggacaggtattttgcaactagattttgcttaccttgaactcgggtagtgggtgggggccctggggtagagtcttggccgaattggacccttgtgtgtcctcagcgatgaggaacacgcggaagtgtggccgggcggtctcggggcaatgagaaactgagttttggccaaaatggaaggtatttttatcccgctcagtgcgcgggctactttgatttcacgtggaggt

SEQ ID NO: 449 - DNA, 499 bp, Homo sapiens
  source 1..499: mol_type = other DNA
gtatgcaccaccacgcccagctaattttgtatttttagtagagatggggtttctccatgttggtcaggctggtctcgaattcccaacctcaggtgatccgcccacctcggcctcccaaagtgctgggattacaggtgtgagccacctcacctggcatttttttttttttccccagagacaaggtctcactctgtcactcagtctggagtgcagtggtgcagtggcacgatcataactcactgcagcctcaacctcctgggatcaagtgatcctcctgcctcagcctcccaagtagctgggaccacaggcgcatgccactatgcccggctaattttttaaattttgttttgtggagatggagtcttgctatgttgcccatagcaagttcaagtctggtctcaaaaaccatgctgctgctgcttttttttggtagagacagggttttggcatgttgctcaggctggtcttgaactcgtgagttcaagtgatcctcctgcct

SEQ ID NO: 450 - DNA, 499 bp, Homo sapiens
  source 1..499: mol_type = other DNA
gccatgttggccaggatggtctcgatttcttgacctcatgatccgcccgctttggcctcccaaagtgctgggattacaggcatgagccaccgcgccccgcctgcatggatgtatgtttttatttctattggcagtggaattgctgggtcaaaaggtgactatttaaccttttgagaaactgtgacttttccagaatggctgtaccattttacatttctaccaccaatgtataagggttccagtttctccatatccacaccagcacttattatttatctttttgattatagtcattctagggggtgtgaactggtgtcttttaacatgcttattggccatttgtagatctttgaagaactgtctattccaatcctttacccattttcaaattgtgttaggtgtcctttcattattgagttgtaagtttttaatatattctcactgcaattcccttatcagatatcctgatttttttttttttttttttttttttgagaca

SEQ ID NO: 451 - DNA, 499 bp, Homo sapiens
  source 1..499: mol_type = other DNA
aaacccaccttgtcccatccacatcaggacatcccagctggagttcaaccttcatcccttctgtggcagttaggagactgaatcaaggtccagagaaggtggaggaatcctgatactgagcggtacacacaagcttctttctccttccttacctgttgcgggcaggaagtccttcttgggatctgaccaccttcccttagagcacttactgtccactctgccagtttttgagcacttgccctatattttcttgggcctataggggctgtgttatcactgaggcagtatacagagtagcagctaagagcatagactgagcttgtcccacccgtgggcctgcatgcggcctagaacagctttgaatgcagcctaacacaaatttgtaaaccttaccaaaacatgcgaattttttgcgatttttttttaagttcatcagctatcaatagtgtatgttatgtgtggcctaagacaattcttcaatgtggccccaggaagccaa

SEQ ID NO: 452 - DNA, 499 bp, Homo sapiens
  source 1..499: mol_type = other DNA
agacggggtttcactgtgttagccaggatggtctcaatttcctggcctcgtgatccgcccgcctcggcctcccaaagtgctgggattacaggcgtgagccatcgctcccggcctcagcatattttattaataggaactctggggcccagtctcatttcttccttaccacttgtaagagccgcagacgttggactgtccaacacctgctgtcattcttctgtctccctcatccctctaaagtgtctgtttccagctatcctcatcttccattccaaatgatgggtgcccaggccccatcccctggcagggattcagacatcgaggccccagctgcgtccttttctccatcccttgcccttggcttcctttcaaaccgtccttcagcttccactggataggaactatctcccaaccctgccaaaaatggaagatctccgttttcgtttagtcacagggtagccatcttgccccttctcatgcactgggccctcctccacca

SEQ ID NO: 453 - DNA, 499 bp, Homo sapiens
  source 1..499: mol_type = other DNA
ggccccagagttcctattaataaaatatgctgaggccgggagcgatggctcacgcctgtaatcccagcactttgggaggccgaggcgggcggatcacgaggccaggaaattgagaccatcctggctaacacagtgaaaccccgtctctactaaaaatacaaaaaattagccgggcgtggtggcgggcgcctgtagtcccagctactcgggaggctgaggcaggagaatggcgtgaacctgggaggcggagtttgcagtgagccgagatcgcgccactgcactccagcctgggcgacagagacggagagactccgtctcaaaaaaaaaaaacagttgaacaggaatgtatgagttgagctctgtgcataaggcttgccagacatcgtcttatttgagtctcataaacccaccaggcgagttgatttttcttattttacagatagggaaatgaagtaagagaacttaagttatttgcccgaggccatcctggcaggtctgt

SEQ ID NO: 454 - DNA, 499 bp, Homo sapiens
  source 1..499: mol_type = other DNA
tcggatccccagctgagagggaggagggtcccggaccctaggagtgggaaggaaaggctcggatcccctgatccccaggaggaggggacccggctgcctcccggttggggccgcgcgagggcggggcgcggaaggatccgggagggccgtgctccgccacccagtatatatctgtccccagtccccggggccgcctcattccctgtcctcggatcacagtctcttctcactacagtgtcgccgcctctgcctgcgtagccccggccatggctctgtagcctcgacccctttgtgcccccggcccgtctccgcgctcaccacgcctgcgctctccgctcccaccttctttcttcagccgaggccgccgccgcctctccttgctgcagccatggagtgagtaaccgcttacctcttctccaactgcctttcccgccctttcgcagctcgtggccctctttagggagccctggggggtggggagtcgcgagcggggaatcac

SEQ ID NO: 455 - DNA, 499 bp, Homo sapiens
  source 1..499: mol_type = other DNA
gttttcttactttgtcaatttctaattttattgcattgggacaaaagaatattgtactctttctactgttggggtttataagggctgtggatatttcactcgcctttgaaaagaaggttttctctgttagtctgtagagtttggtatgtaccaattagattttattacttatcattttggtcttttgtatccttacttaattttgtcctcttgaattttaatggagcaaaagacataaagtcctctaataacatgcgttctgtttgcattctcatactttttatgaatattgatgctgcactatttgtgtacccagggagaaggccagaccactgtccaaagtttagtgaatctgggcagccttgtttcccagttgttggaggatgcctcatggaggaaagcattcctaatcctggagcttgttttgttgtactctaattgaattgtaatgtgtttctttaacctgaatgaatgtttctattttttacttattacacag

SEQ ID NO: 456 - DNA, 499 bp, Homo sapiens
  source 1..499: mol_type = other DNA
tgagctgctcaccttatatctgttgttccttttacacagtgtacagtattcatttatttcctctgctcacagtctgtggtaaccgtgtgcatctgtggctgtgttgtttgtttactttcccttaagttatttccatgttaatctcatggagaagagcaatagaaacaagtactgtattcagtatgttttttaatatagactatggattctaacagctatgatgtattttaacaagtaacaaaatatatcttactttgacatgtcactttgttaacattactttttggtgatattaggtcataatttctataccattagttacttctgatttctaggccacagttccctttaaatattctttgtgttgtttttcccctagtgtataaaatgtcaaccctttgtggctttatatggattttatggattttcagcccttaaatgtaaagtctctatggcctgagatgttgtgtctgtggtttaagctggactgctgagtccc

SEQ ID NO: 457 - DNA, 499 bp, Homo sapiens
  source 1..499: mol_type = other DNA
aaagaacagaccttcttaattcgaatcccatcttctccatttattatgtgattttggacatgtttgttcaacttctcctagactttgttttctttttacgacatggggatcataaagccgggatgcagttgggaataaaaccggataaagctcccaacgaaccgcgggtttcataagatcagggcagggactgggtaaaaggtttcaaagactcctgcactattgggaaggacgctacgggcgagtctatgttgcatgcaggcgactccatgttaagacgaagtgaactccctgaaccttcaagggataatgcacaaccataacgagaataatttttaaaaatagagttttcttccctgaaaacttggagaggtccaggatgcgcgccattctgtgatctaggttgactctccacctcttcagttggtaccacctttcccaaatagtttggagcagagcactccggtctttgtaataacgtactcctaagagctgttcc

SEQ ID NO: 458 - DNA, 499 bp, Homo sapiens
  source 1..499: mol_type = other DNA
taacgataattattgttattaccatgctaacaggttataaacattgactgaactaagcaccctgcatgcccgttctcatttaatttcctcgccaagccaatgtagttggtgctattcttggtccctcttgacagaaactgaggaaggaggaaggaggaggaaactgaggcccagaatctagataaatttcgagaaatgggtgatacagtagccatgccctcaggaagtgtggcgtttgatggaggaaaacagaggtagtcacaaataagtacatttcaaaactgttgtctaaaacaggaagataattagatggtgtgagaacataattgagggagagtttaagtccacttggagttgtcttctatttgggatttaaaattcattatatgttatccatatttgtccagctctctttttgtatggaatcaccagatattattccctttctcatttcctttctcaacatttatagattggaggggggaaggaaaaccaaacc

SEQ ID NO: 459 - DNA, 499 bp, Homo sapiens
  source 1..499: mol_type = other DNA
caagtctggatctgagaggcagcttgtgtgaatcatttacatacatttctgtttatattccccaaattaatttgcaactttatatttttcatccaattatatgttcaaaacatatttttaataattgattttaagaaggaatttgttatattaggatttaaaaactggctcaaaaaacagaagctattaaacaatagcagaaaccagacagtatataggactttaaatggtaattgctaaacatttgaatgttcccaaaaatgtgagtctgtgtgtctctgtgtgtctctacgtgttattccactagggatttgcacagataggttttgcacaatatccttgctgttattgtcagccataaacaaattacacgtatttaacaagttaatgtcagattggccaggagccactgggaggtgtgtacttagtgacatcagctggcaaagagccctggtaacagggagggttggaagggtagtggagagagaggaagcaggag

SEQ ID NO: 460 - DNA, 499 bp, Homo sapiens
  source 1..499: mol_type = other DNA
taagtacattttaatatagttttgggggttaaagtgcacaattctctgcctttcaaagctttttacttctttcaaattacgatgatatgaatgtttcttggtatttgatacaagagttcagcctttctactcagttttattttaatgcttcattttatttatgtttctatttttctgttgccaaccttatatttgaatgtcatgcttttttgaatgcaaggtttacttaataattagatgtagtatatgaattctacagctagaaaagtagtcccacaaatatttctgtaaggttttccacgttggattgttctgtgatgtttagagggaatttttttcccctttagtatgcataatacaaataggccatattaaaaagatggctcataaaacgctcttttctattgtcagattttatttcagtatatgcaggcaaattataactaaaagaggttgaagcaaaactaacagcatctcttcgttttagatatatctaaca

SEQ ID NO: 461 - DNA, 499 bp, Homo sapiens
  source 1..499: mol_type = other DNA
agcagagttctcgcaattcctacttaagcagaatgaaagccatcaagggcaacaaagtggaggtgctgtgtccttggatagaatgttgatttccagccaggcgtggtggctcacgcctgtaatctcagccctttgggaggccgaggcgggcgtatcacctgaggtcaggagttcgagaccagcctggccaacatggtgaaaccttgtctctactaaaaatacaaaaattagcctggtgtggtggcgggcacctgtaatcccagctattcgggaggctgaggcaggagaatcgcttgaaccaaggaggcagaggttgcaatgagccgagatcacaccactgcactccagcctggacgacaagaatgaaactcggtctcaaaaaaaaaaaaaaaatgttgatttccaagtcagcagagccctggcaagcacagagctagacagaacgtgctccccagccctgtctagttctgattaaaccatgtggtcatttcatttacag

SEQ ID NO: 462 - DNA, 499 bp, Homo sapiens
  source 1..499: mol_type = other DNA
tgagtgctgcttttttgtatactcatggggctgattgcaccatagctgagaacgtggaatgcagaatgagcccacctggctttgaatctgggccctacttaacttatcagctatgtggttttgggcataagccactttctctgttaagttttctcatttgtaaaatgtgggtcataattctgccttcctctaggggaagcttttagaatagtgcctggcatgaaatgcctatgaatgtctcagttagtgtgtgtgtgtctttaacttgcgtcccattctcagggcccccacatcagtgtctcgtttacatctcacacagtgaccctgcgaggcaagggtttgcccagtttgcagatgagaaacccaaagctgagagaggtgtggggaaccgcccaaggtcacccagctgtgaatgaacgtggtcagaacacagaatctgagttggtcacacttcccactgatccatggggcctttaagccctctggaagcttccattaa

SEQ ID NO: 463 - DNA, 499 bp, Homo sapiens
  source 1..499: mol_type = other DNA
cgggggtgctctgtatttggaaggatgtataaatgcaaaggtacagttgcccaaggccagagatctggctgaattgaggcctgggagtgagtttctaacatccttgttgattggggctggggtgggtaataatctcttacagtgtaaagtttacaagtatttttccatcttagatcccacgtgatccttaggacagccctttgcaaaggagaacactgaggcccagaaagggcaactgatttgcccaaggccacacagtcaggaacttggctctttgagctctaggcctcttgtccttctaggccactattttgctcctctctggccagattagttcactctcgaggaggggcccagaaggaggcttgttagctggggccagactgtgttgctgaggctgaatgttccagtcttccctcctgcaacatatcttgctctcatagttctcattgtgaagctctgaatctttcttctctctcctccctcccccatgctgcag

SEQ ID NO: 464 - DNA, 499 bp, Homo sapiens
  source 1..499: mol_type = other DNA
taagtggccctgcccccatggaggccaaacccctacttctggggcagcctgccctactagaatggcggggaggttggatggggctgtgattgggtctcctctgacctggctgctgggtgactgtaaaaggtctgggatgtatctttgaagtatggttccttgcagcaggagggattgaggctagagggcaggaataaattgttctggaacagttggtacagggtccccatgggatttcttctggggagctttgagggtggaggcagggaaagtgtggatggcattctcagatcccacctcactttgaggttcagtgatttgccatcagctctagttagtgagagcccatagtcggtgggttttgtttctggagatgcaggcagggccatggtggtagtcaaggcatagagttccctgtggacgtcagggaggaaccagggtctgttctaaagactcctgaggagggcgtgaactctcacacaggcccaaggcttgccct

SEQ ID NO: 465 - DNA, 499 bp, Homo sapiens
  source 1..499: mol_type = other DNA
ggcacccattcctagaggcaggagccccaagttctcgggggtggggtggttcctgactggcgcggtgtgacccgggccagtctcgttctctctgggcctcagtttccctcctccacggggcggcgatggtcaacacaggttcctgccggcccgccccgtagcctggggttccaggctcccgtgccaccgcggcccgcgctgtgtgaccttgttccagtagcctgccctctctggactggcggccccggatttccaagcgctcttccggatcgcgacagagcggtcgcccgctgcggagaccctcccccttcccccgggttgcgggggcgtgggtgggggtggggcgccaggaacggcgcgggcccccccaaggcccccccagccccgcgcccgcggcccgatccgcgcctggttttgggcgcagccgcacggccccctcccccgcgctcctctcccctctccccgccccctccccgccgctctcggggagccggggccg

SEQ ID NO: 466 - DNA, 499 bp, Homo sapiens
  source 1..499: mol_type = other DNA
tgagggcgcgggggtggcgcgcggcggctcctacccccttcccgggccggcgcgctccgtccctcggctagaccccccgatctggtctcctccccgacagacctccctgaaccgggggacggcgctggcgcagaaaagccccctcccctgccagttctgtcttccgatcccgggtccgaggggccggctgtgcggctgggaagcgccttctccggttgggatcgccccatccatgtctccccggaccctcaaatcgggggcggcggcaccggggcccggaacccctgtccgggaccggatccccattccggctctttttcccgcggactcccccgtaccccatatcaagcggctgccaaagcctggaagccccctcctcaggcccgccccctaatccgcagggcggcctgggggtcaggcggacccctcccgtgcccggccaaccttggcgcttgggagagcagggctatgccggcccgggcattcctccattcaaccc

SEQ ID NO: 467 - DNA, 499 bp, Homo sapiens
  source 1..499: mol_type = other DNA
gtgaggcccacccctgccaagccgcttccacccgcaagggagagttgctacagaaatgattcagaagcaggaactccttcaggtatagctggatctaggtgctcatccagtgaggtctggcacaccatctccttcaggtatagctggatccaggcacttagagaatgcagtgggaactagatttttctttctgcttcagcctgtcaggcctgctttcctctgtgttagctttactcttaaacaagctattcccaaatatggccactgttagtttcatgctcatatcttacagcttagcaagtacagtggattggccagatatgagtcatgtgcccacccctggagcctacccaaacccaggaaccaagagggaggaactaagagtggttcccatgggaaaattgggaggcctccaatcaaaagaaggaggaaaggaaaagcaatcattgaccctcactccccattatagttcacttcatgcagccaggcaccacctacc

SEQ ID NO: 468 - DNA, 499 bp, Homo sapiens
  source 1..499: mol_type = other DNA
cctaaccctcttccagatctcacagctccctccatctgcatattccacggtgtcccctgcacctgctgcccccaaagacctgggcatttcaggtgctcctcccaccaagaacctgaccagctcatgggggttaatggggggcattgagtctaaaggttgcacattccctttcctgccactctgaggtttgaggccaagaaaaccatcttgctggaatgaccactagtaatctttctgagtttttatgaggatactgacatcatgcctgaaaagcccacagaagagcatggcttatagaaagagctcttcaaacccttattgtgtggaggggttaggggttagttctgagtggggaggactaagctgggttagtccctagtgaggggtcttctgaggggacctctccccttttccccgctggcacccaggagggaaggagagagaagggccaagaggagtggcctcctgctgccagctgcttagtctgcttctttccgca

SEQ ID NO: 469 - DNA, 499 bp, Homo sapiens
  source 1..499: mol_type = other DNA
ccttaggggcagagcctagtctggaagtcaggcctgtgacttcagagcaagggtttggggtagatggcacatgcgtgtgtacgtgtttgtgtgggtggagagaaaaggaggggcgcgggaggagttgctttagcctttgtctgggttttgaaggatgggaaggggtgggctgcagcactggaggaagggaaccctccaccctgagatctctgtctctatcctatcctgtccctggccttctgaggcaagcggggccaattaaggggaaaacgtacctcctccatttgtgctgaaccaatccctccaacccctctcaggagggcatgatatggagagttgggcattggctgtgttccctgaatacagagtatctctcttgtggtgcctggaactggcatcccctttgtggagcttagggcaagccccgcctctgcatgagacttggtttgtgggacacacttggtttcagggaaggggaaagaggtcaccaagggcagag

SEQ ID NO: 470 - DNA, 499 bp, Homo sapiens
  source 1..499: mol_type = other DNA
agctgacatggacccaaatcctcgggccgccctggagcgccagcagctccgccttcgggagcggcaaaaattcttcgaggacattttacagccagagacagagtttgtctttcctctgtcccatctgcatctcgagtcgcagagacgtaagtcccaagtcctgagaagagggactggggtagggtagggaggatgtcctgtgggtcctgaatcttgtggcactctctcccctctggttttcttggccctctatgcttctaacttgggacctgacatgtaactctcactgtcctggtgtgcagcttgggtcctcctgacttgcccacttcttgatccgcagcccccataggtagtatctcatccatggaagtgaatgtggacacactggagcaagtagaacttattgaccttggggacccggatgcagcagatgtgttcttgccttgcgaagatcctccaccaaccccccagtcgtctggtatgcccctctgctttgggg

SEQ ID NO: 471 - DNA, 499 bp, Homo sapiens
  source 1..499: mol_type = other DNA
aagggtgtcccacatcctcccacggtgcgtgtgctccctcagctgacgtgatttggggaacacgggccgctctcgttctgtggagctggccaagcccagctgtcatgctgtggcacatttcacacctttgcgctgctggatggggctggttgtgctccaggtgctgtggcttctccaaacaggtgtgccttggggcataaggcgtggacagggcgtggacccaggggcctcttgggcacagccgtgaggctgagcagttgctagtcatgatcttgcgagagcctcctgttgagtcaggacttgaggagactggagacagtgctgctgtccccggtggtgtgcggactggaggagccgtcctggagggtcttcccctgctgggcctgactgagcacgagcagggggcctcccctggggctccccgaggagggctgtgagtgggtgctggcctcccttgcttacacttcgtttcctcttctctcctgctgccaccttccag

SEQ ID NO: 472 - DNA, 499 bp, Homo sapiens
  source 1..499: mol_type = other DNA
taaggctgagcctggacacacctgtggaagacttttctctgaattggggcagggtggactccggcagggcccttgggcggctgtgctagtagagggcagtgaaagtgggatcaccccttccaggacagcagtgccagccaggtggttgctgcatctcagggaacaaagcagcagcgtgggatcgacgcagaggccccccggaaccccccggcccttctgtgtcccctcctcgtgcttcccttcaggctcacagaccgcctgctgccgggtctgtgaataactggcctggcgtccaggcctgagtttactcctgaaaaggagcttttttttttttttagacggagtcttgctctgtcgcccaggttggagtgccgtggcgcgatctcggctcactgcaagctccgcctcccgggttcacgccattctcctgcctcagcctctccgagtagctgggactacaggcgcccgccgccacgcccggctaattttttgtattttt

SEQ ID NO: 473 - DNA, 499 bp, Homo sapiens
  source 1..499: mol_type = other DNA
gtgcgttttgcctccatccgtaaatggggctaaggcccgtcacccttaaaggaggttgtgagggtgaaattgaataacgtagatgaaattgtcttgagaactgcgacgtcgattatcacatagctcgcgagttgtaggatggggaagaacgagaactagccgatccagagaagagagtgggaaaaagggccgggtcttggttgcttgcttcccagtgagaaacatacggctttcagcttagttgacagaagccatgcgttgtagccaaatgagttccggtcccaacttatgttagctggcttaatctaaaatgtaactttcttgggttttgtttccttcgtctttaaattatggagattggaccaagaggtggtgtctttgagttctgtgtaatctgcaggataagtgatagaggggtgcagataacacttttgtttaatggccttttcttgaacgttagttcggtagcatagttttaaaaaatatcttactgcactat

SEQ ID NO: 474 - DNA, 499 bp, Homo sapiens
  source 1..499: mol_type = other DNA
tgacgttggtggctgggtctggaagatacgtggaaattaagctaaggatgtgtggcttccagatcaaaaaccgcaaaaatctaacgccgtgactactgactacggtcagagagcacagactggagcaacctctcacggcctgggctgtctgcgcgtgcgtgagccagaaacccgaggggctccctgggcccgccctatcgatcgacccgatcggggatcgtcagcttggttctggccacagaggttgctcttctcgcgatgcttcagacctggcggcagggaaagggtgggctaattggagagccaggaagagcgtgaggcggccccacgctgctttcccagaaggctgtgcgtgctcctcgcttcctccgcggtcttccgagcggtcgcgtgaactgcttcctgcaggctggccatggcgcttcacgttcccaaggctccgggctttgcccagatgctcaaggagggagcgaaagtaagggctgaaggaaaggaatga

SEQ ID NO: 475 - DNA, 499 bp, Homo sapiens
  source 1..499: mol_type = other DNA
gtacatctgggtctctatgtggttctgcagctcttcctttgtttcaagaggatttgcaattgctcattgaagcattcttatgatggctgctttataatccttgtcagatattaataattccaactcctgattcatgttggtgttggcatcagttgattatcttttctcattaaaattgtgatgctcctagctcttggtatgacaagtgattttcaattgtatcctggacaatgtggctctcatgtttgcagacttgagtcctacctacattttcaatgttaccctgtttaaatgtagtttgtagatcctggcctacagaatgaatgcactgatgactctgccaggtagattggtgggctgtagttccaacaataattttagagccttcgtgggctgtgtgctttgtctggtgccaccttctccctgttggtgccaccttctccctgttggtgccacctggaggcagaaagagcttcttgaggccagaccagctggggcc

SEQ ID NO: 476 - DNA, 499 bp, Homo sapiens
  source 1..499: mol_type = other DNA
catagctaattccagtggaccatgttatggcagagacagggtgagacggtggtgcgggaggctagagggaatatgttgggggccaggtactgggtctcttcttaaaatctcaggagtttagagtgcaagaaaactacagaaaagacttccaaacacaatggttctccctgatatttttaccccctattttgttgctgtttgatgaacagtagtgcctgatagactccttgcagtgaccaatgttgagttcagccctcaaatgccaagacgacctcagaggtgctgagagtgaggtctgggaaacacatggggtgtgggtctgtgtttctgtagggcgtggcagtgcagttgcatatacagcataaacaagcagggtgatgggaccacatcttgcctgataacctctcccaccatcttcctaggttttcaggatacctgaggtcaatgagttcagtggttggacttttcctgtgcttcacctcttgctcttctcatttca

SEQ ID NO: 477 - DNA, 499 bp, Homo sapiens
  source 1..499: mol_type = other DNA
cggctgtctttctgggggagcttgtctgtctgtctggggggcttggctttctgggtgtgtgtgggatgcttgctgggttcccgccccagtttcagctgtagcagccgtgctcccatctatgtggggatgtgagggaggcactgttcctttagagacggcgttgcttgctcaagtggagaagctgccagtgtgggcagctccagctccctgcacgctctgtgctctgcccattctaacgtctgtgccccttcttctggatggctgccgggcttggctctggcccccctgttggatcccctggctgctgggtggggagagggccacctactgaacctgagggtgggtctgggtgagtcctggctctgctgccacctgctgggctctggaaggtccctcaccctccctctgggatctcattggattcctgtagtgtggggatggtggcagatactctggctgctacgtgagaacagtgtgccgatccctggggtttctcaag

SEQ ID NO: 478 - DNA, 499 bp, Homo sapiens
  source 1..499: mol_type = other DNA
tcagcacctccagcctctgcaagtacaggggggtgggagggcaggggcttttgaggggcacgaggcttggggacagaggacccgcatggcttagggatggatggcatggtatgggtgctgggagggaggcaggaagagcagggctggtcccaggggcaagcacaaactcaggcctgttacacggccccagacctcactcagaaggggaccctggccgctggcgtgggtttcctcctctctgaagattaggtggtcttggctgccccttttgtatgaagtcatggatatcttttgagatgggggctctcgggaagaaggtgtggggtacattagcaccagcgtttcctgagtgccgcctcccccgttaatgtccctctccaggaaactggctttgccaaggcccccgctgggacagactgtttctttcactgcagtcctgggagccgagggcaaggggacaggaaagaggaagtgacctcagagcctggtggcaccagca

SEQ ID NO: 479 - DNA, 499 bp, Homo sapiens
  source 1..499: mol_type = other DNA
gtgagaaagagccaggccaagaggacgctcaggaagaaatggttcttttcttttgggtggaacggaatggaggggtagaaactaagtggtagcttaaaaagcccctttaggacaattggcagcatttcagaagtgtcaataggatgatgtgttttaatctccacattactgctgctttgtggacacctgactgcatcagccctagacagctagaggtgtgttttgccataaatcagagaaacgtcaggtttcatggcccagaagtgattgttgacattttcccagcggtactacaaatactgcctcttctgtaactatttgaagagtaaagattttgcttcccactggggctaaaaatgatggagaacctaatgctagtttagtcctatatcataaataaatgcttcccttttctccttatatttcttccaccgccctgggtaagtaactcttcagttttccagtttccctcagtttgaagtgccagggtccccacagc

SEQ ID NO: 480 - DNA, 499 bp, Homo sapiens
  source 1..499: mol_type = other DNA
aggcagccccgttgagcccagggctgaccacagacaagcactactgtccacagaacttcacgcccagtggggccagacttggaggatggcagaggagagaagctccaggggcctctccattagaaaccaacttgcaggccacttaatctcctatgctcagcctgtacttggaagctgcttgttcttggctgcacatttgctttgtttgaatcaattaatccaagtctctctcctctccccacccccaaccttgcctttagggtgacatcaatattcatgtaataaagaaatcgcacaaaaagctgactccccacttcctgccctacaggcccttttttcttcctcagcccatgtgcaatcctggctcccagcaagtccccggggctgcttggtcaatgcagccctgtgtgcaggcctggcagccctgccacccccgccttcggctcccattggctgccacggcctgcagtgggctgcaccagggttcatccatcctccc

SEQ ID NO: 481 - DNA, 499 bp, Homo sapiens
  source 1..499: mol_type = other DNA
tactggttttgaatcgcggcgcgtttcccgccgctggggtcaggggtcgaggttcgggtcgtggggcggagggaagagcgggcgggcgggaggcgccggcgccagacgcggagggaaggagctacgagtagccgccgagaggccgcggagccagcgacgaccgacccagccgagccgccgccgccgccgcgcccccatggcggccgccaaggtgccgccgggcccaagcggggacagggtgggcgggcggggccggggccgttatcagcggccacgtgggcggcccgcgccgccgccaccaacctccgccggcctgcaggctcggccgtctgctgggcctcggtggcgcggagtcggggcgcgtggggtttgggggctcgaggcctgcggagttggggcgtttgggggtgcaggctctgcagaggcctgggggctgcagggcccccgcgtgaccttggggtgggttggggagcggccgtcgccacgcgggacggcccca

SEQ ID NO: 482 - DNA, 499 bp, Homo sapiens
  source 1..499: mol_type = other DNA
catgtgttctggaagactcgaacctaaaatatgattattggtgctctcttatcctctaaattgggccaggatttcatgactttcaccggtacaatttatctagttattaacttagttttctgaactgtgaaaaaattgctggcagagctgtgaatccagtgtaaatactagcagtcctgtagcgacttttttcgttttactaagcaagagcacaactatttcctaattagtcaaaactgaaagagttacattttgctttaaagtaatatttcaaaatctatttcgacccatcattgtgtcctttgatcttcacacagcaggtatcatctgcattttatggatgaggaagaaactgatgctcaaagagatgaggcagtttctgccaggccactctctgcaagtgttggcggcttgtagggtcccccatcagtctgtgcacagatctgattgatgtctgtgaatctgggggaggggccccaagttctggtgtctcactctg

SEQ ID NO: 483 - DNA, 499 bp, Homo sapiens
  source 1..499: mol_type = other DNA
cctgcctcagcctcctgagtagcagagattacaggcgcccgccaccacgcctggctaattttttgtatttttagtagagaccgagtttcaccacgttggccaggctggtctcgaactcgtgaccgcgtgatccacccgcctcggtctcccaaagtgctgggattacaggcgtgagcccccgcgcctggtcaactattttatgcaatcagtatttattatgctcctactatgtgccaggcactggttgtaactgccatctgattggacgatccgtaaacgctgaggcccagtctgtgcggttcacttgcgttcctccacgcgccccccagcacagtgggaagcacacagtaggtgctccgctctgctcctgtgccccgccccgcggcccctcccccgctccaggaagtgcgggggctccagccgcccggccggccgcgatgcattctggggaaggagcagcaccaaatccaagatggcggccagcaggaggctgatgaag

SEQ ID NO: 484 - DNA, 499 bp, Homo sapiens
  source 1..499: mol_type = other DNA
taagttccaactccaggaaggcctgaggtcggccccgatcgcggcgcggttctgcttccctctcctccactcagtcatcccgatctcccctccctgataaagtgccatttttggggggataacggttgatttcagtcgttcgaatcaaaacgggccaaagtttataataataatttggtactttggatcttgaatgcagcagggtgctttctcgctaattggcaccttttggtgaggaacacatgctaaattggcttagtacttttgccagtggatttgccaaggtcctctgtagcccaccccgccagcatctgtgagtcggcggctgggtagtgctgccggcctgcaacgggccggaaattaaaaaaaggcccaggagccagtttcctgaggggagataaagagctggggttcgttctaggcggagcagtgcttggtagagctagacattgaacttggagccacagtctctgagcattccctccgtccctgggaacgt

SEQ ID NO: 485 - DNA, 499 bp, Homo sapiens
  source 1..499: mol_type = other DNA
gtgatctgaacctgaagtccgaggccccaagagttctaagtaacccaggggtggaggtggggtgggggatcccagctctttccgatctgggagatcagaaagatgctcatctgggagagtgggacctcccctttcagtccgcccacccccgaggaccgcacttggagggccgcacttggaggaccgcgcctccaaggcgggcgcggctgacgcccggggcccaggccatgtggggcgtgcgtgccgggagaagtgtcccagcgcctcaccccgcaagcatgagaaccacgaaacccccggggccgggaaaccggggcggggcggggcggggcggggccgggaagcggcgcggggctgggccggtgacgtcgcggccccgcccccggccggctccctcctcccggagcgctccccagcggagtcctcacctgcaggcacaggtgtgcgcacttcgcatctcgaaggccggccagcaagcttcaggtgagcgccagcagca

SEQ ID NO: 486 - DNA, 499 bp, Homo sapiens
  source 1..499: mol_type = other DNA
gagaccccatctctacaaaagatggaaaaattagaaaggtgtggtgctcgcctgtagtcccagctactcaggagactgaggtgggcagatggcttgagcccaggagttcgaggctgcagtgagccgtgatcacaccactgcactccagcctgggcaacagagcaacaccctccctgcttcaaaaaaaaagtaaataaaaagatctccacaatgaacaggtattctgcatgacttccttggaagagatttccagaaatggaattgctgccctaaggcaaacgctaatttacgactcttgggcagctggaacctgtccgacagagcggagacccttatctctgccaccaccagcaggctgatattttcaagaaaaaaatttgccaaatacaagcagtctcagataatacaaagaagatggaaagtttccggagcgcaggtgtcagatccaaagataacttgacccaaacaccccgatctccatgtccctatctctctctta

SEQ ID NO: 487 - DNA, 499 bp, Homo sapiens
  source 1..499: mol_type = other DNA
gctactcggatgtggaccagcagagttccagctcgcggctccgaagcgccgtctcacgggcgggctccttactctggatggtggccacttcgccaggtgggctgcaacccgtgcccagttacttccattcttggtgatagtgctttcttacccatctctctgcagttgggcatcctgcccatgcagagagactgtaggaccattggggaaaggtcattctagaataatcactgggagcccagagctgtggggacccccttgcgtggaagggaaggagtagctgcagagcaggacagagggtgtgggcaggtgggatccaaggacctgggtcccggtagggcaggacagaggcatactggcaggtgggggtggggtaggggcagggaggacggcagacgggacaaaggagcggtgcccccaaacaccatatggagccttcggcttgatggtcattcttccaggccggctcttcagacttctctactggtgggctggcacc

SEQ ID NO: 488 - DNA, 499 bp, Homo sapiens
  source 1..499: mol_type = other DNA
ctccctcctgagcagatccgaggctgctgggaggcctcaggaaggctgggcagggagccccggggagctggagagagggcagcatgtggcaggcacagcgcccctcccatgcccggccctgggtgcgccccagcctggcctgcggtggcccctggtgccctgggctgtgactgcccttcacttgtctgtcctccccaccccacgagtctatggcaacctaaggccaacatccttgcattcaggcccattccagcactttcctgtggggctcacacatggtgggtgctcagtcattctgagtggtgtgcatgtcagaccccagcacctagttctgaacagcagcttgaggggtggctggtgaggagagggatgcaaacaggaagctgtcagaagaaacagaatgtcaaagagctcccatttcattccttactgcacaccgggcctgtgtggggctgtggggatgtgaaggagggtgggtgacttgtggtcttggctcaca

SEQ ID NO: 489 - DNA, 499 bp, Homo sapiens
  source 1..499: mol_type = other DNA
ggaccccgggatccctctcccagcagccgcccatctagggccctgagccaataagagctcgagatatatatgattcaccgggcctgggccaatcaccttgacgcgcgctcttcgccagcacctcgcgcgataacctggcgtcctcggccttcacaataaaaactcttcgccggaaaacgacctttccccgcccactgcgctgacaccggaagcgaggcgtgtctgggagatcactccgcgctccggcggcgaaggaaagaacggactctgatcatagaagcctagtaaagtagtacacctctctcctttcgtgaggccataagaacaaactccttttctcgtcacagctacgccctgggcataaacggttggggcgtcaaagggagggagggaagggagcgggcgggaggagacggtcacgtggtcgcggcggaaggatgcgtctgtgctgcgtccccatagagacgaagtctataaagggccggcgggcggccacggc

SEQ ID NO: 490 - DNA, 499 bp, Homo sapiens
  source 1..499: mol_type = other DNA
ttctactttgcccgcccacagatgtagttttctctgcgcgtgtgcgttttccctcctccccgccctcagggtccacggccaccatggcgtattaggggcagcagtgcctgcggcagcattggcctttgcagcggcggcagcagcaccaggctctgcagcggcaacccccagcggcttaagccatggcgtgagtaccggggcgggtcgtccagctgtgctcctggggccggcgcgggttttggattggtggggtgcggcctggggccagggcggtgccgccaagggggaagcgatttaacgagcgcccgggacgcgtggtctttgcttgggtgtccccgagacgctcgcgtgcctgggatcgggaaagcgtagtcgggtgcccggactgcttccccaggagccctacagccctcggaccccgagccccgcaagggtcccaggggtcttggctgttgccccacgaaacgtggcaggaaccaagatggcggcggcagggcgg

SEQ ID NO: 491 - DNA, 499 bp, Homo sapiens
  source 1..499: mol_type = other DNA
gtgggggtcgggagtggtgagggaagggtggcgcatctcagagccctcgcaaatttctggccagaaatgtgggggtatgggcgcagcttggccaaggccatgctgcaagggccagggtggccgtccttcctcactcctgtctggcctccctctgcagggtgcttcaaggatgaccgcatcgtcttctggacttggatgttctccacctacttcatggagaaatgggctccccggcaggacgacatgcttttctatgtgcgccggaagctggcgtactccggcagcgaaagcggtgcagacgggaggaaggtgagtgacccccggcccctgcccctgcgtctgtgccccaagcatccctgtggtgtctgctctcggtgtacatgtgggctttcctacagtgctcatgcatatcaaagagggtgagtgatatttattgagcacctactgtattccaggaactgtgtagacagtctcatgtgcaaatctggatgtgctgggt

SEQ ID NO: 492 - DNA, 499 bp, Homo sapiens
  source 1..499: mol_type = other DNA
agagcttggctgcatattttgaagtgttgaatctgtctagagaggggacagacccacctatgttgatcctgctgtgtgcccgtggtctcggtttgtctgcatgtgccccgaggaacctgtggctcagagcccccgcccattgtcccatcaccagcggcagcgctggaatggaaacccagatcttccctaccaaagcctgtgggctttttctcttttgcaggaaaatattacaaatatttatcataaagaaataccatttgtaatagaaggagaagtccctgtgaggatcagatgagcacgaagctgcgcagacgtggggcaggggtggggcgggtgctgtctccctgcggttcccgcttgcagccttggctggctggagggcggctgtccctttaagtcgggttcccgctgggactgccgcagccagggggagtgggtgggggtgagagatgttggtgagagccctgcctctccaaaggctcccccccagccaagcctt

SEQ ID NO: 493 - DNA, 499 bp, Homo sapiens
  source 1..499: mol_type = other DNA
gtgagttaaaacaaagtacaccacgatcaatgacgattgctttgaaatgtaaacatatttctatctgcagatatgtgaaaggaaagtgagaaaatcgtgtgtcagcatgatttcttttgtctatctttaaatgataaaaagccaagaaataagttttcagaggacaaaaaggatggctatggaaaatgtgattctgaatcccgcccttttttctttctttctttatacttaactttaaatttacataagcgagccctttgttttaaagctagtttggaaagctggtgattaaaatgggcaacttggccaggcgcggtggctcacacctgtattcccagcactttgggaggcagaggcaggcagatcacttgaggccaggagttcaagaccagcctggccaacgtggtgaaaccccgtctccactaaaaatacaaaaattagatgaggtagtagccccgtctccactaaaaatacaaaaattattaggtggcgggcgcct

SEQ ID NO: 494 - DNA, 499 bp, Homo sapiens
  source 1..499: mol_type = other DNA
ttcacaacagccctggggcaactattatcgtcaaccgccccccatcttgcagatgaagaaactgagactcagagaggttacacataaccatggggaaatggagagctaggatttaaacacagctccagtcccatgcaagtcccaaagcctcccctgagctcttttcctcggagttacactctctcttggttttgagccatggctctgaagttcctggcatggagcagatgttctatttgtggggactgcaccatcttcccacataacccagctttctcacataccttttgctcagtcccagggaaaacaagaaaccttaatttgcaaaagcacctgagagtttaatcttgcctttggttttaaagaaccctaccccacgtatggtgagctctctttacatgttaagtattctttataaactaagaacttcagatggctcgattcagtcttggctgctgtagaccacatgaaaaccaacaagcctggtttcctctgcgca

SEQ ID NO: 495 - DNA, 499 bp, Homo sapiens
  source 1..499: mol_type = other DNA
gtaaggagattccaccagtgaagatcctgggggtggagacacttaacacccattttcctgggacttgaagcgaatctttaggaatcaggataggatttttgtttgtttgtttgagacggagtctcactctgtcgcccaggctggagtgcagtggtgcgatctcggctcactgcaacctccgcctcccaggttcaagcgattctcctgcctcagcctcctgagtagctgagattacaggcacatgccactacgcccggctaatttttgtatttttagtagagatggggtttcaccatgttggtcaggctggtcttgaactcctgatctcgtgatccactcacctcggcttcccaaagtgctgggattacgggtgtcagccaccgcgcctggctgccaaggtaggattttaagagcagagcacctaggccttttctgttctctgggctgaggataagtttgaataccctcttactgaagggtgattgattttggcaagggc

SEQ ID NO: 496 - DNA, 499 bp, Homo sapiens
  source 1..499: mol_type = other DNA
tgagatcgcgccactgcactctagcctaggtgacaaagtgagactccatctcaaaagaaaaaaaaaagaggggaggaagtccggacccaagatgagttgccaccttcttagttctggtcctcgtaccctctaggcagaatggctctcagatagacgtgtatgacaagaccccaatggaacagacccaaatcccttgcttttagagcgtgccaaggccagtcttctggacagagcaattcaaaaggtgctagcgtgagctgctgtttcccactcttgctttagcaaagcttctctctgattccaactccatcagtcagctttgaccctgcttccttaccactcattgtccctcccttcctcacctgtaaaataggatagttccctcttcatggagatggagggtcaagtgtcatgtgcacacagagctgagcatggggctggcaaacaggaaatgccctgtaaatgctgccagacagaaacctcagtccctgtctctgca

SEQ ID NO: 497 - DNA, 499 bp, Homo sapiens
  source 1..499: mol_type = other DNA
gcttccgcaatgaattccagaatctactcctggccatcatggtgagtgggacctgagcaggggcgggcagcctgggctgaggtgacataggctgtggaatggttcttggaataggcagaggatgtttctcaggctggcccaaggtcatgaaaggatgagggaggcttctcagggtatttggttggaccttgcgaaggtaggactgtgaaagaaagagtttgaggttagatgtttgagtagtgagcacagcaaaagcaagggcgaggacaccaggaacttggctcagaggtttgagagggcagcagacaaggtgggcctggaccagctctgagctcccctggggagccgtcaaaggtgcctgtcatcttcgttgctgcccacatgatgtcatctggctgctcttgggcagggctgggagccactttggggttctgggaagggcaggaggggctctgtggctctaaagcacctccctttaaccccctttgtccatccacag

SEQ ID NO: 498 - DNA, 499 bp, Homo sapiens
  source 1..499: mol_type = other DNA
tgagtggggttgaagagcagagcctgggttgagttgggatgtctggtgggaacctcccagctgattcatcttcctgcacccccttccctagtcagcagtgccatttctcatcttggtggccctcatggagagtaacctcatcattacatatgcggtagctgtggcagctggcatcagtgtggcagctgccttcttactaccctggtaggtatatacaggcccccctcctcgggtatctccagcccctagtccccagttttgaagctccttagggagagttctatgcagtgttctcccacaggccattctgtgggtccaggttaggagtgggggaggtctgtcctgtacagttgtacaggtagtgagctttgcaagaacacctagtcagagtgaaaaatgggggctgtaatctggcctgggctccacttgccacgctgagcacctccaggcagggttacttcctcttagagcaagaggccttttcttattcatgtgaagg

SEQ ID NO: 499 - DNA, 499 bp, Homo sapiens
  source 1..499: mol_type = other DNA
gaagcggaagtcccaatcaaaagttgagcagtagctgtgagttgctggcgctggagcgattcggtggcacgtggagccacggcgtgggagtagggggctgaaggcaggcagcagcggccagggccgccctctgctagccgcttgggtctcgggataccccgtttcttcctgtaggtgtgggacgtgcgtgcggcgagatggacactcccccgctctcggattcggagtcggaatccgatgaatcccttgtcacagacagagaggtaggtgtcagccgagctcgtggggctgggcgtgggagagggggccttacacccctgggagtgaccgtgattgtgtcctgcagttgcaggatgcgttttcccgagggcttctgaagccaggcctcaatgtcgtgctagaggggccgaagaaggccgtgaacgacgtggtgagcgtgggcacagggtcgggggtactcggacatgggatgcgcttcaggcgctgttgggcttgggag

SEQ ID NO: 500 - DNA, 499 bp, Homo sapiens
  source 1..499: mol_type = other DNA
agtttcataatacaagtcgccatttatttcctctacatttataatactgcatatatattcaaattggccaaaatctttctttccaatcatcatgctgggattatggggttatatgtggcacataccattcctgtatatgtcaggatggaaaaagttttacctggaatgaatttttgccatttctgatccacattgtacttcacacagtgatttcctgaaggaaatataatgatctgttcatcgaagtagaagatattgttggccacgtgggatcgaagaccaaaaacatgcagcgtctgagctaccacggctgacatgatctcccgccaaacagttctgctgaagaccaaggcagcgcttcagagtggagagcaccgccccgctccgaccccgcccccggcccggactcgccctccccgccctttgctcctccccttgtctctcccctttctcctccccttgtccctcccctttcccctccccttgtccctcccctttc

SEQ ID NO: 501 - DNA, 499 bp, Homo sapiens
  source 1..499: mol_type = other DNA
gtgagtgagactccgtctcaaaaaaatgtggaatagaacaaactttagttttaggaactagactttatattgtagatctagttgcaattgacacgtccttgttttatgggaggctacatactttaaaggtttccaggggagcaaataattaattatgattttgtgtatgtgtgtttgtggggggtagtcatcaggaaatgtctgaggccttttgccttaccgtgtgggtctggctaatgtgtaatgttttgactcaagattgtaaagtcaaattattcatccggggagaggatggtcgtgtaactgaatcagcctcccaagatgaactttccctctggcgtaagtttaggagtcctgatattttattttcctttacaacagaaagcagcaaccctgtaattaaagagaacaatgaaggaagctatctaagccatgagggttactgaggatctgcgctggggttaaggctgcgaacttaagaaatatttggatagacagt

SEQ ID NO: 502 - DNA, 499 bp, Homo sapiens
  source 1..499: mol_type = other DNA
gcctccgggttcaagcgattcccctgcctcagcctcccaagtagctaggactacaggcgcgccaccacactcggctaagtttttgtattttagcagagacagggtttcaccatgttggccaggatggtctcgatctcctgaccttatgatccgccctcctaggtggcctaaatctacatttttacataagataaggtgaatgtttgaagaaaaagggaatggaggaagaaaacaattatgtggtggactcagggtaatctagtagtaaggtactactagaaaggtagaaagtagtctagtagaaaggtaatctagtagtgaacatttatggaatttgtggaatagaggccaggtgcggtggctcgcgcttacattcctagcactttgggaggccaaggcgggcggatcacctgaggtcaggcgttggagaccagcctagccaacatgatgaaacctcgtctctactaaaaatacaaaaaattagctgggcgtggtggtg

SEQ ID NO: 503 - DNA, 499 bp, Homo sapiens
  source 1..499: mol_type = other DNA
ctgcccaagaccatgggaacccacctcttgcatcagtgtgacttggatatgagacctggagtcaaaggaggtcattttggagctttaaaatttgattgccttgctggattttggacttgcctgggccctgaaactcctttgttttggccaatttctcctggaatggctgtatgtacctaatacctgtacccgcattgtatctaggaagtaactgacttgttttttattttacaggctcatgggtggaagggacttgacttgtctcagatgagactttggactgtggacttttggattaattctgaaatgagtaaagactttgggggacttttgggagggcatgattggttttgaaatgtgaggacctgagattgggaggggccaggggcggaatgataatgatttggctgtgtctctattcaaatctcaactaacttatatctcccagaattcccacatgttgtgggagggacttagggggagggaattgaatcataag

SEQ ID NO: 504 - DNA, 499 bp, Homo sapiens
  source 1..499: mol_type = other DNA
taagtcaaattaaacatcctattcttcccagtctcaggtttgtctttatcagcagcataaaaatggactaatgcagtaagttagtaactttcccccatatttttgttagtggaaagatagaatagtttttttttgttttaatggaaagatagaataagaatcttggattctttaaggcctgaacttagatgccagcagtggctgggaagggcacaggaaggtgatagtccatgatgacgggttgatacagacttacttaatatatgttgactatgttttatccttattatgccttcttatgccttcttatgcctctttctttacccttcaccttacagccaatccaagagttggatatctcaaaaaaattaggaggcctgggtgcaaatgtttcctttcatttctacctttcctatacccctattaggatgtggaggtgaacagatgcctgaaaatcttgaaaaggttgtccatgggtccaactctatattaactaaat

SEQ ID NO: 505 - DNA, 499 bp, Homo sapiens
  source 1..499: mol_type = other DNA
tctttctccttccccttctcttccctcccctcccattatataatctatgctgttatgttacctattttatccactaccccatctttactggaggtgttgttctagtggactctccaggaactcctctatcctcctacttcaatcaggactaggctttctctaaaattactataagccatcactctaaactttcccttaactggtttctggttagtactgtttcctggattcctttccttcatctttcttaactacacccttaagtaacctcctaagaagtatgcgataagtctccatctctccatgcctgaactgccttttattctgccctcctcgattgttagtttggtggagtatcaattcttagaaatagcctttccaagagaacattgagataattcctgccttaacatatagtatccagtgttgcttctgagcagtcagatactattgtgatttttactcctcactgtttacttataatttcctttttaaacag

SEQ ID NO: 506 - DNA, 499 bp, Homo sapiens
  source 1..499: mol_type = other DNA
aaaaaaaaagaaagaaaaaaaaattctcctcatttttgttgttttgaattttcagtgatgaatctggagtggttctttttttatttaatgtggttattttttgaagagactttcaattccatgtctcctgtcaattctaagaaattatattatttctttgataatttcctctcctcttgtttctttgtttctctttctagaatctgtatgttggatgatggaccctctgcgtagatcttccacatctcttaccttttatctcatattttcggtttctttgttttgtgtgtgtgtgtgtgtgtgttatattctgagaccttgccataccctcttcttccagtgcttctgttggatttttatatactattatttttgtaaatttccaagtattctttctcagagtattctgttctggttttatgcatattttcttaaatgttgctagaaataccaattcgaggatttttgttcttttattttaaaaattcttttttcttct

SEQ ID NO: 507 - DNA, 499 bp, Homo sapiens
  source 1..499: mol_type = other DNA
aaagaaaaactatgaggttcttgcttcaatttatcatgggcttgaaagaacagtttgacagggcactgagctggcaagggtttgaggatattgtcagtgtctcatatttgctagtgagagtgtgaactgttggaatcatatatgaaatatttaagtgcacatacctttgatctagcatttccacatttagaaatctatcatatagattgatttactcaaattgaaaatggtatatataaaatagtacttatgttgcagcattgttgtaatgccaaaagactgaaaaaaacattaaagcccctctttcaggtactgataagggaaatcttgggaaacactcataaaggaatactctacagccactaaaatgaagggagaagctctatttgaactaacaatgacaagtctccaagatgtatcataagtaaaaaaaaaaaatgatgcacgaagcatgtataattactaccactgaatttagaaaataataaatgtatgcata

SEQ ID NO: 508 - DNA, 499 bp, Homo sapiens
  source 1..499: mol_type = other DNA
gaaagtatcagatttggcttgatatgaaatgatactgaatgatctcaaattgctccatttgtttctgtatctgcctgactcatcctatacaactagagtaaaacatattccttgtcccaaactggagcttgacaaccagtgttttatacagggtcagcagtccccattatttgctagatgagcatggccttgctatatcggtggaaaggggaatcaattagaattaaatctgcattccctctcaaagggcattcattgtgctggaacaaaattcctccccacctccagtgagatggtgctgaggaaatgtcacaaaggtgtatatcatggatactccccttatttaggtccagtcatctggaaatgtcagaccaactcatcaaagattttctaagatgttagagaaatggacacatgtttaactaatgaaattgttaaatacaaacctcggtctcttaaaaattggggattttcaaaagtaggctcttttacttttata

SEQ ID NO: 509 - DNA, 499 bp, Homo sapiens
  source 1..499: mol_type = other DNA
gtgggtgaaacatccctgtggaggatcccagttattgagtcttagtcacagatgataatgtgatgctgatttgcatttaccttgctggaggcaaggcaggcgtgggcaggctgtcacagtcatggaacatgtgtgggagctgtgagagtcagaaggaaaatacattatcctcatgaacaggcccagtttctattcctggtctgggagaataatcattttgaggttgttggcttgtggttgatctcctggtggctaggatagccccatatttatccttctctatatcttattcatttctgtttctccagttccaggctattgccctgtacccagtaaggtcctcagttaccctttatgaataagtgattttggtggaacgatcctctactgagtggagtacaaaggatggcaggggctatcccttgactccaaaactatatactctagctgggaaattgcttatgtacctgaaaaagtcagaacacactggggagaagac

SEQ ID NO: 510 - DNA, 499 bp, Homo sapiens
  source 1..499: mol_type = other DNA
gaagtgagcaccagccattaattatactcctgcagcaaatgtatttttcttgttcagagtggtcctccttaccaagagagagtctactttcatagccatgtagctcctgatcagatttttagttcccaaaggtacctaaagctgactgagggattatattatcgttttttaaaaaaaaaatttggccaggcgcagtggctcacgcctgtaatcccagcactttgggaggccgaggcgggcggagcacgaggtcaggagatcgagaccatagtgaaaccccgtctctattaataatacaaacacttagccgggtgtggtggcgggcgcctgtagtcccagctactcgggaggctgaagcaggagaatggcgtgaacccgggaggcggagcttgcagtgagccgagatcgtgccactgcactccagcctgggcaacatagcgaggctccatctcaaaaaaaaatttttttattttccttactctcctctgcaatgactgta

SEQ ID NO: 511 - DNA, 499 bp, Homo sapiens
  source 1..499: mol_type = other DNA
gtggcccacgaagctacccaagacatctctgcacagccctagcctttttggcttcacccactccgttcgggagttggggacccggcctctacattccttaggggaactccagctccaggtcctatttggaggcggctcctagtttcctagttttctgggggcaccaggtgaaagggtgatgagatatccatacagcctttctcatgcctcggtttcccccgtgcagtctccctgaataagtcacttgggaaagaaagtgtgagaagagaggaatgttcctggtacaggagtagatgagtcaccctgggtaggggaaggtcacaaagtggctggggccagggagctgcactctgctgaccaagcttccccattccttgccccatcttcctttgcatgatttttcccaaccactctggtctgtcttcctaggtctgagagtcactggagctaccagaagcatcatggggccctggggagagccagagctcctggtgtggcg

SEQ ID NO: 512 - DNA, 499 bp, Homo sapiens
  source 1..499: mol_type = other DNA
agacttgacaatgcggggtctccctcttttaaaaatatccatataatcaaagcctttgttgactggcccgctccggcccctcagtcctccacagatgcgccccagggccccagccccgaggtccttttcctaatatccgctcttgctctcgctcactctcctcaggtcgcctgctccgcccgctcccgctcccgatctctgattgctcctaactgacgtcactcccggtctgtccccgcccactcggtgctgccattggcagtcggtcgtgggtacgcggctcctgtgggggaggggggagctatgggagggggcgggaattcccgactctaggccggaagcgcgcggagaccatgtagtgagaccctcgcgaggtgagtgcgggctgtctggcagcggggtccatgtcggctgcccaggcctccccgggcccgggaacaggagtcccagctcacgcattcttcatctgcttcccgcgacgcttggcggcctcgcaccc

SEQ ID NO: 513 - DNA, 499 bp, Homo sapiens
  source 1..499: mol_type = other DNA
gtaaggctcctaaattctagtccctcaacccctggctctgacccttcccccgtgcatgtctctgtatagtaaccaaacctctcacctctctgaggccttcaggtaactcttcaactgctgccagctcctcattttcttggtaccatcgccttagtctccccaaatccacaagaactcttctctatttttctctgttcccctcttcccctacccccaccacctagaactctctcgatcctatctccatgtttcctgtatccctgtccgccacatctttttctcccgatccgatgctagcctctttctgtcttgctgagcttcaaactctcccactgtgtccccacctcaccatctacttcccaggttccctgccccagtctccctgcacctcagctgaacaagggtttgggaagggtggaacaaggtggctgggtgtgctggagggtggcccaaggactgtgatcatgaatatgcagccagcttggtgaggaacgtggaa

SEQ ID NO: 514 - DNA, 499 bp, Homo sapiens
  source 1..499: mol_type = other DNA
tcgtcgtggttaaacctctacttcccttcaccccagcctctctggcctcagaatggaagagtaaggtcctaagaggggagctacaattaccgaaaggctgtggaaaatagcgagagagacaggccggcctaagctaggaagggaaaaccgagagaacagaggccgggctggcagccttggcctgctcaaaagggtgggcgggcagggggtggagcccggaggggtgccgcctctcctctttcccggagcctgggcggagagggaggaaaacttcttcctggcctgggctccgtgccgctctgtttgccaaccgtccagtcccgcctaccagtgccgggcgctccccacccctcccccggctcccccggtgtccgccatggccaaagcctacgaccacctcttcaagttgctgctgatcggggactcgggggtgggcaagacttgtctgatcattcgctttgcagaggacaacttcaacaacacttacatctccaccatc

SEQ ID NO: 515 - DNA, 499 bp, Homo sapiens
  source 1..499: mol_type = other DNA
ctcccaacgtgctggggttataggcatgagccactatgaccagcctaaaatggggtcattttaagtgtttacatctaaccaactaatagctttaacacaaacatgcacacacacacacacacacacacacgtacaatgtggagggtatacatacaatataatataaattatattatttatacagcaaaagcagatgaagagagacagggcaggccaactggcacaggtgcaggtgtctggtgagtgtggcgcaggctgacagctgggccatagaggcatctctcctcacaattctggcagtagagtaccctggttaagtgaactgggcggggaattttacctccagaaaattattttctgtgctgcatttccattctgagctttgactatcatgtgctctgaagttagagcagtgggaggctagaaatgagtgggtggagaatttaaataaaggaaaagccacatgtgactttagtgttgtttgtgatttttcccacag

SEQ ID NO: 516 - DNA, 499 bp, Homo sapiens
  source 1..499: mol_type = other DNA
tatgaaatgtagcttgctctagggcaaacttacagtatattctgttacaaaaaaaggattcagagtataaaagccattcctagagaagcagtatggcaggttggaaataactctgcattaggaatcagaaggatacatttttagtcctaactctgccaccaatcagacgtggccttagacaagtcatctggggacaccaggtcttttcagtggaacacacagcctggccccctaccagtggcaatcctgtcttcacttagtccaggaaatctattctgacttcactctcttcctacctctcaggctgctctttctctgtatttgctggtatcgcctcttcctcactcccaaaatttagtgagctccaaacttagtcctcaggcctcttctcattcctatttacacccactcccaggtggcctcatccaggcctgtggctttaaatatcatcatatactcagggctcccaaactgtgtctctgactcaaatctttctcca

SEQ ID NO: 517 - DNA, 499 bp, Homo sapiens
  source 1..499: mol_type = other DNA
cagatgactattagaaagattatacctttctacagttctgtttctacattgtgggcataagagaaaaatataaacatagaattaaattagcaaaatgtgagtacatttggagtgcttgtagtcacggcttgtcgaatgggggaaaggaggataagtaaccatgactccaatggaacatgttagcataatcctttttgatatgaagtcactagggtggacacaacatattttaggaaagaagagttcaggctctagagaaagactgccagggttcacgtttatcacctcacctgatgatctctgctgtgatgttggggaagtgcaactgaacttattatatttttgaaatgctaacgtcagtatgtagcacaagttaataactattaactatttggattattttataattttattttatcctaaactactcattaggatgcattttatttgctcatgaaagagaaaattatgattgttaattgtttttttctgctttcag

SEQ ID NO: 518 - DNA, 499 bp, Homo sapiens
  source 1..499: mol_type = other DNA
aaaaaagaaaagaggttttgctaaccctttcagagcattgggaacacagccagaagtgcattaaatgtatatattaacttgggcaatgttgacactttaggatgctgaagccaggtgcagtggcacacgcctgtaatcctagcactttgagaggccaagctggcaatcatcagaggtcaaaagttcaagaccagcctgttcaacacggtgaaaccctgtctctactaaaaatagaaaaactagctcggcatgatggcgtgcacctgtagtcccagctactcaggaggctgaggtgggagaatcactttaaccagtggggcagaggttgaactgagccaagatagtgccactgcactccagcctgggcaatagagtgagactctgtcttaaaaataaataaataggatgctgaaaattcctatttaaggaaataattctttttctgatttatttaaggctacatttgtattttcttaatacaaatattttgaaagtttct

SEQ ID NO: 519 - DNA, 499 bp, Homo sapiens
  source 1..499: mol_type = other DNA
tgacctgacaggaggtggagctcaggcagcaatgtgagcaaagcagagtggctataaatacagctgaagctttgcttgcctgcccgctgctcactttctgctgtgtggcccagttcctaatagtccgtggaccggtaccggtctgtggccctggggttggggatccctgttatagagcaaagcacataagcacaatgcgtgagaattggaaaagtctctaaaattcttctaggctccaaaactaaacaaacaacactgaacagatccattttcattgagattcttcttttagttcatatttattactgggataatattaataagtatatttaagccagaaaatataaatgatttgccatgttgaaaacccaaatctttacttaagctagcctggttctgagcccccattcagagagctaactgctgctcactggcttcagagtatatagctgggtctcagtccttatgttgtaacttgtgaaaaattttctttcttcag

SEQ ID NO: 520 - DNA, 499 bp, Homo sapiens
  source 1..499: mol_type = other DNA
ttggtttcagatttacctcttattgggctgaaattgccaacagcagttgtataatgcaccatgtgtgtgtgtgtgtgtgtgtgtgtgtgtgtgtgtgtgtatgtgtgtgtgtgtgtgtgtgtgtgttgttctcagaatgtgaaaaggccaaatgtagtggttgtctaaggccagaattagcaacatattattggagaatagagggcttaatttccagtctgtaaggagaatggaaaactctgatctcagccgagagagtaactcgtattttaacatgagaccatgaattatgaaaccaaaactaaccgcaacttatgaggcaaaaattaaccttccattttggaaaagatgcttagaatagttacatccttaaaaatgacccactgggacagaaggagagctaggacccaaattctcctcccagtcttgcccacatctggcttacggaaacaggtttccaaagctgcaggaaaattgcttactgcctcttgaatgaaac

SEQ ID NO: 521 - DNA, 499 bp, Homo sapiens
  source 1..499: mol_type = other DNA
aaggcggcagcggggttggaaacccacccccacacagtcaacacctgctgtcacaccaggctaatcaagaacacttttctttggtgcattaaccacctgctattaaataaagggctgttactaggtggcaaagtaacacactgcagtagagcctatttgtaatctgagatcagtggctgtaaggcaccatccttgagccaagcaagtactaatattcttgttatcttaattagaatgcaagagatcgtgtttttaaaattctctttgaatctgtcactttgccctcctcttcctgggtgatacacctggtagtgctggtgggggccatcataatgccccttgtcccagattcccttcttttagatgggactcgagcactgatcatttcagccctgtatctctcaggtcagcgtggttcagtttgctgtgcagagtccaggggagataaccacgctgtgcacacatgagattggctgacttggcaggactgtgcaattgt

SEQ ID NO: 522 - DNA, 499 bp, Homo sapiens
  source 1..499: mol_type = other DNA
taaggagggtggtttgtaaagttcactggggagggtgatccctctttattgttctaatattatgctcgcagcctccttgacaacatcatgcaaaatgtgtcttactagcttctagtgcataaaatattggtggagctcttcgctgtgctgggccagtcaccagtgctgggcactgtgggtcaaggcagtgcccaggacgggcacagccctgccttcccaagctatggtttattgtggtaggatctgcctgcccagtgaagtgtgttcagctgctcctgttgctgggggaagctctgctctctgccttcggctgcctcccacacgctcccatgtgtctcccagtccctaacccctagtcctgctttcaataccgcaggggcttttagctgacttttctccatcttcttaaagggcaggatttcctggcagagacataacgtctttctggaaatgaaagaagctgatgcatgttttttcttttctgaattacttaaataag

SEQ ID NO: 523 - DNA, 499 bp, Homo sapiens
  source 1..499: mol_type = other DNA
atgaaagcctgcaatgtactttggagggtggatgggtgacttatttactgtgtcagcagaatagactgaaaagttaatactgattatcattgctggaatcctaggcattctcttcctatgtcccatcatacacattagtatgggaggtgggtatgattgctgcaaacagtctttgttctctgagcacagacagataaagaatttatgtcaatttaatattaaaactttatagaagtgagttggattttaccagctcagcactctgaaccagttatagccacattctttggagcaggaaataagtatcatttatatttggttttcccatacatgatttttttttttaactgcataggcatagttagttgacgtaccatagtgtacatttttgggcactattacataattaatgtatattagaatataggaaatgtttattctatttttttttttgagacagagtctcgctgtgtctcacccaggctggagtgcagtggtg

SEQ ID NO: 524 - DNA, 499 bp, Homo sapiens
  source 1..499: mol_type = other DNA
cctactttcctgaaatgttcttaaaaactggcagtaggccgggtgcggtggctcatgcctgtaatcccagcacttgaagaggctgatgtggttgcatcacctgaggtcaggagtttgagaccagactggccaacatggcgaaaccccgtctctactaaaaatacgaaaattagctgagcatggtggcgggcgcctgtaatcccagctacttgggaggctgaggtatgagaatcacttgaagccgtgggggcggaggttgcagtgagctgagatcacaccactgcactccagcctgggcgaaagtgcaagactctgtctcaaaaaaaaaaaaaaaagcctggcagtagaggattatcagacaatttttcttaattcctttttgtagcacttatttgatgttctgaaggtcagctaatgtgtatttttttttttaattttagaagctgaagtcgttttttaaagagtatggacaaatagaatctgtacgatttcgttctct

SEQ ID NO: 525 - DNA, 499 bp, Homo sapiens
  source 1..499: mol_type = other DNA
tcatgaaatttaaatgtaagacctttttgtccagtatagataagttctgaaataaggcaaaagataaagtaaaaaatatatatataaatatataatgtatgtgcatacattatatatgtgtgcatatacacacatgtacacatctagatatgtgcatgtgtgtgtacatatataccaggtataattataccagctatgattcaagatttgagaacataagatgttctctctgtctttttccttacatatacacacacacgcacgtattctgaaatcttgaaatatacctggtatcaaaaacctacctaaggttgagtttataaagacagaacacaaagtgttttctaagacaacttctattttatgtagcaatagatgtgcgtatcatcgtgtagatgctactggttttaattactgtggaaactattataaagctgagtccgttttataggtttgctatatgaatgcactaatcaatcatatattcttttttctgcag

SEQ ID NO: 526 - DNA, 499 bp, Homo sapiens
  source 1..499: mol_type = other DNA
tagtatagaattttttatcaactgtaattttgcatttgtaattaatgttgtttattacttacatttgtacttagaatgtatctacctaattgatctcttcattgtttaatccatttagtgattatagctttgaaactttgggattactgaggaaaaatctgaaggatttccaattatttactttggaaaggagatttaacttacatgaatggataacaagagtttatgtgtggtggtgcctgtcatctccactaaagacaatttaggaggaaacagcccttccagtaaagccaaagagatttaggttatctatcaggaagtgattcagcctttaaggtctgtagtacattggaatacgcattatcaaaagagagcatggggatgggcgcagcggctcacacctgtaataccagcactttgggaggccaaagcgggaggattgcttgagctcaggagttcaagactgatgtggccaacatagcaagaccttgcctctact

SEQ ID NO: 527 - DNA, 499 bp, Homo sapiens
  source 1..499: mol_type = other DNA
acttgtcctaggaatatcaccagttgtttttgttcttgaaaagaaaaggatagagaaagaagactgaggaaaatgattatgtaaagaaatctgaaaaccataaagtatctcattgctttgtaagctttatgaccatggtaatcaattttattttaatggctaaatgcaaaggctatgtttccacccaaaagatacttaaactgatcaagtgattcaaatgtgaaacaaccaacctaaattcttagggcagtttggttcataatatttgatttatttaaatatattctcttcacttgtggttactgttattttaatattgccctgttattctctcatgtttttctctcaaatcaggctgaagaactatgccctggttattctaatcccaattacatgtacttagcaaaggtaatgaagaccactgttctgctttaagatcactttgaacctatcgcataaaaacggattatgtttaatattggttatttctcatttccag

SEQ ID NO: 528 - DNA, 499 bp, Homo sapiens
  source 1..499: mol_type = other DNA
taagtccagaaagtgacagtgagtgctgttgtcttgttagtactattcgagctcaaaacaggaataactcgcttagatacatttgtagttttctctattcaattttatgtatttatttttattctacctttattgaagtataattgacaaaaactatatgtatacagcatgatgttttgatagacatatacattatgaaatgactaccacaatcaagctaattaacacattcatcgcctcacatagttactttttttattgttgagaacatttgagatccactctcttagcaaatttcaaatatacaatacagtattattaactacagtcacattgctgtcctttaaatctccagaacctattcatcctgcataactgaaactgtgtaccctagaccaatatctccccatttctcccactcttccagcccctgacagccacccttctactctctccttctatgatggagttttctttctttttttttttattatacttt

SEQ ID NO: 529 - DNA, 499 bp, Homo sapiens
  source 1..499: mol_type = other DNA
gctcgccgggccgccgccgcgtggttggcgccagcgcactggggcagtcgcgcgcgcccaggtgcgggccgcgttacctcagcagacgctagagagtgaatgagccgcgcgggcccgggacccttggggctcttcactctccaggccgtcccgtgggcgcgctagccttttcaagtgatagtaatcggagacttttccgttacatgaggctcaacaaaagattgtaattccagcagctctgtttgggaaggcactaccgcggcgagtccagggcccggccgggggtcggcggctgccgggcggctggggcgaccgcggaccgtgcgggaccggtagggggtcgcgggccggctaggctcccccgcgcccctcctcgtggtatagcctgcatttctaatacaatgctgttatgctaatcaggtgacatcaccgcccagcacacggcgagtggctcctgataaaattacaaaccggcggccgccgcgggcagctgggagga

SEQ ID NO: 530 - DNA, 499 bp, Homo sapiens
  source 1..499: mol_type = other DNA
taagccccctcccaaaggccgggcctgtcctgggtgccaacgggggttcttggaggctttatttgtgaccctaatgaagacgggcggcttcacagctcggccccagaccctgtggttggctgcgggcaccccattcacgacttagggaaggcagttgctcatactccactccagaagagctaccatttggagtccctgtctctccagcacctttttggctttctaggttgtcagataactgctgcacacacattttctttacttttagctaactttacctcctagtagatcagtgctcatagacttattagtatgcaggtatttgattccgggtcgcctctggctcccagcccccagcctcttacctctgggaagctttaaaggtgtaaagtgccgtgctcagacccagtcctgtagaacaatagcaaaggggaggagggaggggtctttttgttcctaagcctttggtaaattacagttttttattcagaagcttaat

SEQ ID NO: 531 - DNA, 499 bp, Homo sapiens
  source 1..499: mol_type = other DNA
gtgggtagtgcatctgatggagccggcgggtccgccctgtcgccgtagttgggggtgagccctgaggctgtctgtgcgggagctcggcgcttctgtggcctaatccgggcggactctctggagcttcctctcaggctcagagacccagttcttgagtctctgcggtacggaagcttgtagagactggctgtagagccagaacggaggagctgttttaaaatcgtgtgcctctcccgcccccaggccctctaccgggtgcattccctcctcttctaaacgcagaatcagaatgtcacacagaagggaagaaaataccttgtctcgtttcctcattttcccagtaaggccctgaaagaggaggtgacatgtccaaggttacacagtttctaagtgatggaattccgacgagaaccaggacccctagattccctgcacccaccaccattaagcccactctgttcccttgttttttccgcctccctgagccctacctttgagt

SEQ ID NO: 532 - DNA, 499 bp, Homo sapiens
  source 1..499: mol_type = other DNA
cgagaaccttttagaaggaatgctccagggagtctttgggggcagtcactgagctgggcctggaggctgagtagggtcctagaggagggaatgggtcaggtttaggggctggaaacagcattcgcaaggcagcaccagcaccagctaaaaacctagccaacagggaaaacaaagtacggaaacacgcatgcgttcacagtgctgcgtgaattaaccaagcgttggcgcaaacgggaaaggttccccggcctctcttggtcagggtgacgcagtagcctgcaaacctcggcgcgtaggccaccgcacttatccgcagcaggaccgcccgcagccggtagggtgggctcttcccagtgcccgcccagctaccggccagcctgcggctgcgcagatctttcgtggttctgtcagggagacccttaggcactccggactaagatggcggcgacggccaggcggggctggggagctgcggctgttgccgccgggctgcgcaggc

SEQ ID NO: 533 - DNA, 499 bp, Homo sapiens
  source 1..499: mol_type = other DNA
gttggttgaggggtttaacaaggctaagaaggtgagtcaggtttagactttggaagttgaaccacaggatttatgctacatacagaggaatgattgttgcttcctcttatgttaagttggtatgtcacgtaaaacctttcagagtgctttcacgttacttgtttaatcatcacagacaactttgccagtagggtcttatgcccattttacagaagagccatttttggattagaggagtgaagtgacttgcccaacgttacacagcctgttagaatttgagctgaacctcttgactcttagttatggattacacctttccatggcttctgatgcttttgatatggactttgatgtgtgggatagctttaccttaaactcaaaaggctttctagccagttactatttttctgtccccaaacagccaatgcatttaccttaagttcctaactcttgttttagaaaatctcttccctcttttccctgatgtttacatttatgg

SEQ ID NO: 534 - DNA, 499 bp, Homo sapiens
  source 1..499: mol_type = other DNA
ctacctactgaaatatttccataatttcctgttatgtactcctgggacttagtgcacctcctcagtgaagccttccctttcccagcttccccagctcttagcctccctccttccccgagagtcttaacagtttctcccttcggtagcccacgtttggacgttggttaaattgtaatgtgtcttggggttggtaacatgtcatacagacaccttgggtgatgctgtggtctggcaaagaggtcattggaccttggaatctgaggctctgggccctagtcctagctctgcccctgtctagctctgagacttctacaactcatctgtcagggtttcagttctcccttttataaagcaagagattaaatgatctctaagggtccttctacttatgtccagggactgatgatatttgatgactttggttatttttctttggcggggtgggaggtttatgtaaatgttttctgcacttttggtaaaatctccactcccttcctca

SEQ ID NO: 535 - DNA, 499 bp, Homo sapiens
  source 1..499: mol_type = other DNA
tccttaagtgaaaaatctgtgaggagttttctatctttctaagtctttgtggcacacttatcacatgcatagtactatttctcaagttacccaggcacacacagatgtatggctttcaggaagccatacatctgtgtagctctgaggcccagccttgttcaacacttcactcagaagaattgctggcctgatgaccaacaataattgtcaacaacttaaaacttcattgacggctcctaaaaaaaatcagtgtgcatgtgtgtgtgtatgtgtgtgtgcgtgtgtgtgtgtgtgtgtgtatgagtgtgtgtataacattcattactgcaaactggaatggagtggggctggaaggcagcccagaagcaaggctcagagcctggagctgctgacctcttggggacactgcagccctggcctggcctacttttctcttctcccatatctggaaaatgaaagtagcctgacgtatccggggacccggcccaagactccaccc

SEQ ID NO: 536 - DNA, 499 bp, Homo sapiens
  source 1..499: mol_type = other DNA
taaggttttaaagggcccgccctggcttccttgggcctgtagtttgtgactgtgtcgttttcagagtgggaaggcccagagttggccccatggaattctttctgcttctagggtgtttgaagagatagaaagccagggtaaggttcaccgaacctccaagcaaaaataaatttccagaaggggcccctttactctgaggacattgaatagcaacaaaaactaccactgaagagtcattttgtcccaggccctgtgctggaaactttgaacacctgtgttcacccctccctcatgacactcatgaagatataccatggctgtctttattttctaggtgggaatctcaggcttgagggttggggtggcttggggaaggtgtgtatctaagaggtagctcttatttatttttacttctagagattaagacacattctttttcaagatagacatggaactgtcaaaaaggattaaaagttaaataaggataaggttatgtaaa

SEQ ID NO: 537 - DNA, 499 bp, Homo sapiens
  source 1..499: mol_type = other DNA
agcgcgtgcacagccaggctgcgaaggtgcagcgggcgggaggcccgttgggggctcagccggctgccagaagctctcgggctctttccttccgtgcccctcacttgctcatgggcccatgcctagccctgattcgttggacagagccttgtgagcgggattttccgtttggggatttctaaatctgctgcccaccccgcaactgccggaaagttgcccatggggtggacttcgctgtgtagcgggagaggggtgggagtcgagggtgcttgatggagagatgggggaaggggttgcacggattggaggagcgaggagactcagtccccatcccgaagcacagggcaggacgtcgcggcggagtggggaagcgaggagtccgtggccgagagcttggaggtcaggggaagtacggggccggctgctcagagtgcgggacgaggagaatcgcggcccggggagaggtgacccaggggcccctcccttctctccagtgtag

SEQ ID NO: 538 - DNA, 499 bp, Homo sapiens
  source 1..499: mol_type = other DNA
tcggtgttgaacgcgcgggccccagggggagggaggggaccaacgggctccggcgctgacaccgcggcactcatgccctgtcccctttcagctgtttccagcatactgtgccccgtctgtcctcaggccagggcttcgctgcagccccggccactccctagtgcctggcccggtggtggccaggcagttggccgcgctgcttctcccgcagaggggacccccactgggggcgaaggcttggcctgccctcttcactgctgtatttccagacctgatgcctgcgtttgtgagagctctggatatatggttttcgattgaatgagtgaactggaggggcttccccttcttgtgttgctgaatctttctagctgccctgttggggcagggaggggcagacacacttcaggggctgcattgcccgaagggtgccacctttcccacctctccatccccgtaactgggctgtcatcaggccacagtaggattcttaccctctccc

SEQ ID NO: 539 - DNA, 499 bp, Homo sapiens
  source 1..499: mol_type = other DNA
tccctagagttgactattgccttgattttggtttcttttcttagttctccatgtacctattactattttgatccccaagcagatatattaatctcctctcaatatatgcaaacatatcaaggaatctgtttattttaccccaagggaacaacttttctgaagccctctgttctttttttcagtttaggaagatctgctttggcctgctatacaactattaaggagggaatttatttcactttctgagaatcattttctttctccattatttgattccctgattctatatctcatgcctttcttttctttgtttcctcggtcctttgtttcctgaacaattctttaagaactttaagagtgaacgagaggtaaactttttgagactttgtatgtttaaaaatcccttggttctatgttaatcgtttgactggatatagaactctatactgaaaatggttttgtataatagatctaaaggtacttttccactgtcttttag

SEQ ID NO: 540 - DNA, 499 bp, Homo sapiens
  source 1..499: mol_type = other DNA
ccttggcatgtggaataacttttacattgctatgtgttttgttttccctattttgaactttttagaatcttcttacgtctagtattctgaaattttaaaatactgagctgtgaaatggttcctttttacccattttatgggtactccctgggctatttcaattgagattcagatccttcagttatgcggaactttggtaatcattcttcaccactgttttctttttctggaacttttattcatcaaatacttcctggattgattacctaattttcttatatttccagtttgctacaactttcctctttcagcccatgtattaactttttactattatatttttaatttccaagaatgttttctatagcattcttttcatcattcccagatgtaataccttcttattcattacaaaatgttcctctgctctctctgcctctttccatctctgtttcttatgttagacagctccccaaccacctaaagagccttggttttc

SEQ ID NO: 541 - DNA, 499 bp, Homo sapiens
  source 1..499: mol_type = other DNA
gatctgcccaccttggcatcccaaagtgccaggattacaggcgtgagccacacacccggcatgttttctttttttggaaacaataacaggatatcagattgataaatgcaataccaatttctgataatttatcttgctatataatacttcatggacttcttgcactttgtggtgttttattagtcaggaataaggagaaaacaacttatagctgtggaaagagtacaaattaatttttaaaaactggagaataaatcaagcaattcggcttttgaagactttcacttgaaaaaacactttttactttttaattatcatttcttaataataaaaattatgctcaaatgctgctcttatgccagatttttaaagaaccttaatctgaaaaaaaaaactattttataatgcaaaagggctcacggtgaaatttagatcggcaatatgaaattacaaatttattattatcgatatgacctaacttgtgcctaacttgatttag

SEQ ID NO: 542 - DNA, 499 bp, Homo sapiens
  source 1..499: mol_type = other DNA
tatgcacgccatttacttcttcccaccttactccaaacatcactctacttaagagtgttctaattgcatgacttgtgaagtactttagcttgtgtctgagtaaaactatttcaaaagttaaaaaaaaaaagagtaaaccttgggccaggcacggtggctcacgcctgtaatcccagcacttgggaggctggagcagggggatcacgaggtcaggagtttgagaccagcctgacaaaaatggcgaaaccccatctctactgaaaatacaaaaattagctgggcatggtggtgggcacctgtaatcccagctattcgggaggctgaggcagaagagtcacttgaactcgggcggtggagattgcagtgagccaagatcgtgcccctgcactccagcctgggcaacagagcaagactccatctcaaaaaaaaaaaagcgagtaaatcttacatttttaaaagaaaatctgtaatcttttttgcttcaggcatctctatttaa

SEQ ID NO: 543 - DNA, 499 bp, Homo sapiens
  source 1..499: mol_type = other DNA
gtaagtttggtatttttaattttgagtacttgtgaattggatttctcctataagcagaaattatttattccatagccacaaagagttcttgatttgggcttatcataaaacagaagtgacattgttctataaatgaggtcatcactgtattctaacagtatctatattatacctggtacatagtgtgtgtctggtatttgtatataaatggacaaataacggaatagagtatcttgttcttaaccagtgatcactaatattacccattatgtcctgattctagcatctcagatatcaattgatgggggaaaatgaacttctttttaagtgtcaatattttgatttgaacatatgatttcgaagtatggtttatattatgacattatgtcaaatgtatttttttaggtatgatgcaacatgtattaagtaaaaagctgtttcttaagtgttttgaacacttatttttttgtgtgtttacatccctattgtcctttctcta

SEQ ID NO: 544 - DNA, 499 bp, Homo sapiens
  source 1..499: mol_type = other DNA
aaaaacactgagagaaaaacactgaaattgaaaaacactttcaatttatttgaaagataactttcaaagaaattttcataactcaaatgtgtttcttttttccagagaagtatatcagagaattccctggtagcaatggacttctcaggccagaaaagcagagttatagaaaatcccactgaagccctttcagttgcggttgaagaaggactcgcttggagggtacaagtagcttcacatgcttcaaaatatttatgatttcagtttgtttcacctaaaaacttgagatttgttttctccttccttgctcagaaaaaaggatgtttacgcctgggcactcacggtagccccactgcctcttcacagagctctgccacaaacatgggtatgtctgttcatagtcattgccactgagtagacggatagacatggaaaggacatgtaatgaaattgcagtcatctcaaacaaagctttgcattcatccatcctatttcttta

SEQ ID NO: 545 - DNA, 499 bp, Homo sapiens
  source 1..499: mol_type = other DNA
tcagaaacagttattggtattgccaaaaaaaaaaaaaaaaaaggaagctaagaagtcacccttctaaataaataaataaataaataaataaataaaaacctgaattggagagctgcctgcatttcactctactgcctctggaagaagagtgttatctaaagtgcttccatcatgaataatgattgagaaactgcttttactctcccgactactgtactcccaggcagaaacccacggctgaagcccacgatgcccatgtgtaacttggttattacacacacgtttggagcccagtgtgcagacccgcagcgcagaggaggcggcggaacaccccgggttggtcgggtttccaagggctgacccgagctccagcactttttccgcgcctgatttttcaggtcattttcgaatgggctatctttgcttacattttgagcttggatcctctccagaaagcattactaccttctaaaaggaaaaacatctcgtatttgcagac

SEQ ID NO: 546 - DNA, 499 bp, Homo sapiens
  source 1..499: mol_type = other DNA
taggagaagatgattctcttgcaacacgtgcggattgtgacaaaatctttcattaacaaggggagtttcggtgaagtggaggtttggggaaaggcgaggaagtcggtctggagcaagcaagcaaagtgcggaagctgtactgggattcttctagaaagtggggtgggaaaggagctagggagggcgtgtggagggacgagatctgtgtcagaacgtgcgtgtgagcggatacaaaacccgagagaggcgtgagcagcgctgtgtttgcgagcgggagcgaggggcgccggctggggtgtgtgctcctggtgagtgacaccgaggggaaggcgggcgggtcggcgggcgggggcagcctgcgaggggcgggagtgtccctgcgtggggcggccgagccggagttgtgtcagtgaaggaatccagtccgggggccgagctggctgcgccctccgctgcaagcgccggcagcgcggggcgagctccggacggcgcgcggccc

SEQ ID NO: 547 - DNA, 499 bp, Homo sapiens
  source 1..499: mol_type = other DNA
agggctgaggatcgctccatcttctcagctgtcttggatgagctgaaggtggctcaggcaccttggaaagctgttaatactttggtaaggagagaaacaagtatctgtttctaatgttctattttgaagagctgcaacctgaatgttgactgaatgttgactattggatatgttaactacagggcagatagaatgcatacacttagtgaatttaaagttgttgtatatccatgattgcagttaatgctgattatgagttgatagcagtattctcattaagattcagacaatgaaaataatttcaaaccagttttgaacaagatttgatatttagaatcagaagctaggaattttatgtatttcagtgtccaatttacatttaatggtgcctttagagaataaagaagctgggctaccactcgagctaatgatacattctgtaattttattgcatattttaaactactcatacatttttattgttgtttctattaattag

SEQ ID NO: 548 - DNA, 499 bp, Homo sapiens
  source 1..499: mol_type = other DNA
taacactgtatattgttttccaaaacaatgattcaaaaattgggagatacagaaatgcatgctgtatgctaatagcactagggttctatatgtagtaatttataaatccattaacaatttccaaaccatcacagccagtttaaggaccaatgtgtggtcttctagtttaatgctttcccttcagggagtggccataggaagactacagttcttcatctagaagtgtagtgtaaggcatctccttaccaaacagagagggtagctttatattaaagaacaggacaatttaaaaaagacacacaaattgaggtatctctcgccagcgtgttttctgatacccagaaatgacagcttatctttgactattgtcagcaccttctgatagtgcctttgttttaaaattttcagtttttgagatccgattgtttaatagataaattataagggtgaggaacaggaacagtgaggatcttttatattaaactttaaaacaaagttt

SEQ ID NO: 549 - DNA, 499 bp, Homo sapiens
  source 1..499: mol_type = other DNA
gtaggtaaacgatctatattgaaatttattgacaaattatgctttctgattccatttgtgatgttgatagaggtatttggtaataagcaagtatagcataaaagattgactttaaaacatagataaaatggaaagcctaattttcttttttttttttttttttttttgagatggagtctctgtcgcccaggccggagtgcagtggcatgatcgtggctcactataacttccacctccaaggctcaagtgattcttgtgcctcagcctcctaagtagctgggactacaggcacaagccaccatgcccagctaattttttggattttagtagagatgggttttcaccatattgccctgggtggtctcgaactcctgagctcaggagatctgttcgccatggcctctcaaagtgctgggattacagatgtgagccaccgcacccggcccagaaggtctaattatcattatggaagtactctttgatttacagccagattgtc

SEQ ID NO: 550 - DNA, 499 bp, Homo sapiens
  source 1..499: mol_type = other DNA
cccggtaatttttgtatttttagtagagatggggtttcaccatgttggccaggctggtcttgaactcttgacctcaggtgatccgcccgccttggcctcccaaagtgctaggattataggtgtgagccactgcacctggcctcctttgttatttaaaatcgatgttaaaaataaccacaggcttgaaatccttaaaattaccaatgtgttttcctttgtaatcaaagttctttaaagtattcctcttacgtagtgatttggggagccttatctgggtctatgccatgtgagatttgcttgatcatcagctgtggcttggatttaatattgaaggacatagttttttcttcgttgtttagacagaagctcaacaagacagactccatagcaagaagtctcttgtggaattctgtcaggtagttggcacacttgtgagcttgatgaacaagagaaatattcaacagaagctgattgtcatgtttatgttttgtctttcaaa

SEQ ID NO: 551 - DNA, 499 bp, Homo sapiens
  source 1..499: mol_type = other DNA
gtagttattttcaaatcttttcgaaaggaaagaaggaaggaaggaaagaaagacgcaggaatatgtataaaggtatagcaaacatcacacttaatggtgctgctaagtgcttcttccttgaaattggaaataaggcaaggaagtccactctcatcacttctcttcaacattgtattcaaactcctaaccagtgaaatgagaccaaaaaatagaaataattgtttggaaagaaacagtaagtcagtctatttgttcatgatataattattttctttaaaatacaaaggaaatctataaataatttactagaaatactacatgaatttagcaatgccataaattcatggttaatatgtttcaaaccaattatattttcatataatagtaataaggaatttgaaaagcattatcatttaaagtaacaccaaaacaataaaataactaggaataaatttattattttttaaatttaattaaattaaattttttatttcaatag

SEQ ID NO: 552 - DNA, 499 bp, Homo sapiens
  source 1..499: mol_type = other DNA
taagtaaatggagagatatacaatgttaacagattggaagctcaatgttgttgtcatctcccccaaatttatctgtagcttcaattcaaatccaaaaaaaagtcctaaagttttttcttgaagaaattgacaaactgatttgaaaagataatgtataaaagcaaagaatctagaaaatccaagccaatcttttctaattgacttcaagacttttgttaagccatgatatttaaggcaaaatcttaccagcataagggtagacaaatagatcaatggtatagcatagaaagtacatatataaacccatgctaatattgtaaattgttttttgaatattttcatgaccttggagtaggcaaatatttcttagatagtacactaaagtcattaattataaaagaaaaaaaaataaattggatttcatcaaaattacagatttcttcccatcaaaagacatgattaagaaaatgaaagagaagctacagactgggtgaaaata

SEQ ID NO: 553 - DNA, 499 bp, Homo sapiens
  source 1..499: mol_type = other DNA
cttactttaaggaaggtccctggaagttgttcatttcctgcataatagtccgttgattcttgcatttgctgcacttacgttctagttcattaaaagaatctaggctgttccttgggggactcatcaaaaacccacatttttatgttatttcagttttaattcagtttttaaaaatttatgcagaaaccactgagcaaataaaatgctcagaaacattctgggttttaacctagattgaatgagtttgaatgagttgagccttgatcattcaaccttagtcacgcagctcacaccgataaactggtcagaatacacatctttaagagaaaaaaacattctcagagctgcttctataaaaaaaaaaatctctcaactttggtggtatatttggatctattcccagtatattcccagtatattttgaagcaaaccatatcctgcctgagaatggaagtgggaaatctattcttaacacagtgttctttctttgtttttacag

SEQ ID NO: 554 - DNA, 499 bp, Homo sapiens
  source 1..499: mol_type = other DNA
gtgttgcttttgtcattttattgagagtgacaaaataaaattccttaattcggtcagattcacttctatagggatttggttcccagagttacatgaactgacttctctaagcagatgactagagcattctgattaaatgcaagcaaatgaattcccccctctggttctggttcttgtcaacatggccagatctgaattctgtggcccactttttggtttcccccaagtcaggcatccatctgtagccccggggactccagattcattgactcagagccaccccaatgtgtcatggggcttttttgaggcctcatgtgggctcacaaacaggtgctcctgctctatgttggggtcaacacgaatgttgattgtccacaaaccacttgacaatggagcttcgggcccagcaaaggacatgattcccttgttgtaggcattgtctccagagtgttcctgggccctcctgctccaaacacacattcattccaggaagaatctg

SEQ ID NO: 555 - DNA, 499 bp, Homo sapiens
  source 1..499: mol_type = other DNA
agtacattcctcacatttgtgaacagttatgtttctaattatatgatgttcaagttctgtagtctcatagacctggattcaaatcttggccctgctctggatagtactctgaccttgggcaaattagagtttctttgagtaccctcaaagatcatactgcaaacatagtagtactgtaggtactaaacacagaatgatgtttgtgaggtacttagcccagtaccaggccttatgtaaacacttaaccgattgaatggtgtcatatgaataaggtcatgacaaggtttttctttttatttaaaggtgaatcaggtctaggaaaatcgactctcataaacagcctattcctaactgatctgtacccagaaagagtcatacctggagcagcaggtaaaaacattcttatgttactgtaagtgtaattctacatgaaagatgctgaagactgcctaattaatattttatgtcttagctgtgtgttttgtttgttcttgttcag

SEQ ID NO: 556 - DNA, 499 bp, Homo sapiens
  source 1..499: mol_type = other DNA
taggtgtgctgcaccgaggtccttggatttgggttgtagactttctttgacacgtatccatggatccatcctctcttgagtttgtctgtaaaatgtaataagtagtttctgcctatattaaatatttgatggaaggattaagtgagaatgttttacatcaaaaatgctgtgtaactagaagattactaggatagatgttcgaattcatctactgtcagaaagttccagcacaggacaccagcatccacaaatgactgttgaatgaaataggcacacatagtgagagcctaagacttgggctgctgcaagaatatgtagccctttcagaatatttttgaattcagtttttaaatgaattcgtaaattgctttctttttcccaggaacagaaattataatttttaacatttgtgtttttaaccttccccagtagcacaataatcttagctttaaccttcccctttctgacttctctgggatctttttttcttaatccccat

SEQ ID NO: 557 - DNA, 499 bp, Homo sapiens
  source 1..499: mol_type = other DNA
cagagactccgcagggggagagcccgcggtgcgtgaaacaaacctgttctctcctcagacctcaaagacagcggctccaccgcggtacgcggccaccggctttggagcctggaccccaacttgcctcctctcgcggagagacagtcgccgacgctcgcttagccgccgagacctcgccgccaactctctcacctctcgagacgcccaggccgctcaggctcgaatcttgcggagcagggggcgggacaatagcggccgcggcgccccactcggcagaactccgccaccaggcgcgatgccggaactacatgtcccatgacgctctgggaggccgcagctttccaccggaaagagggtggctgaggtgggggaggagcccaaaaggcattgtgggagtacagctctttcctttccgtctggcggcagccatcaggtaggctgcgttgaggatctttgctcttccatccgcctttgatcgtcttcctcttcagccatccag

SEQ ID NO: 558 - DNA, 499 bp, Homo sapiens
  source 1..499: mol_type = other DNA
tcaggatgcgggacagcaaaggggtggagaggcggcccccggggcgggttgagcgaagatgtgatggcggcgcgaattcgagctgggcccggatcctggaggaggcgtggggctgacgaatggggcgcccgggacaaggcagcctaaagtgaggctgctggttgggtggggtagatgcattttcctcgagagttaatcctcggtggccgcagcagtaccttgtcctgtgatgtcagcggcatctcctttcaggtcctccttggggacgccgcctgccgcagccacccgcccccttggtgctcagttctggttctgttaattcgccccaccaaaacgtgccgagcaccgctctgtgctggggttgcggaagtgactgaacgcggctccgtgggcgcagtggtgggggttgggctagctgtccccggcagttggtgcagagccattttcattcccggcggtttccttgtttttgttggggaactaagatggacggatacag

SEQ ID NO: 559 - DNA, 499 bp, Homo sapiens
  source 1..499: mol_type = other DNA
gtaacgagctcttctcttaggttttggagtcagagtttgatttgaatcctactctacccactcttcattcagtaatcaatatttattgagcaacttctacacagtgatgagttggggacacaaatgatgggcaaaacagacaaagcttctgccctcacagagcttaacattcttctagatttaacagggctaattcaactttctaagacctacctataaaatatagatgatacatatttcatagaattgttcagataattaaaagagataatattaaaagaatgtagtgcattatagtgggacatattggacactcaaatgttaattaatttgtcttctattctaaatatacaacaaacatagccaattactggtatggaaagatagagtatgcattaagacttctataatataatattaatatgttgttgtaatgaattatactcaaagaacttttgaaaatttataaattgagaagctatgaaacttgctactaata

SEQ ID NO: 560 - DNA, 499 bp, Homo sapiens
  source 1..499: mol_type = other DNA
tattcatgtgatctgaaataaggcaaaagaaatgttaaagggattagttgacacaggagggagattagacattttggaagaaagcaggcatagtgaaacacgggttggaaacgtggctgtagttaaattgcctatgtttacatctcaactctccacttactatgttactttggaaaaaatacttaaattcctcctacctcagtttcttcatctataatgttcttgaacagtgactgatattagtaagtaaccaaattttatttcaagcaagggatagttaaaaactcactttctagtaataattactgatctaagatacatgaaattcaattgataatctttatttagagtgctatatttagttttttattttaaactaaaaaatatttaaaaggactttttaggttctcttgcatggtctaaagtccctcttattctgtttttcccaggaggtcttaaaaggttttagccacagtttctccttccatcatgtttttca

SEQ ID NO: 561 - DNA, 499 bp, Homo sapiens
  source 1..499: mol_type = other DNA
gtaagaatccattaaagaaattaattttaaatgtgcattacctggttacataaaggactctagaacaacttaggttcttttgggactgttgaaacattgtctttaaggacagaatgtactgggtgcctttctctgtactctgaatatgcatgtgtattgcggtggggatgggggagttgggggccctcacttggtccttctctgttgtttttttccaggacaaagccaaaggccccttgttagctggccatccctgccccattttttcccctggtcctttcccctgtggccacagggaagtgtggcctgaataccccaccccggctcctctgcacccagagctgggggccacctcagaagtgtcatctctctctgagcacgcattcccctgcagcagtcgaggactgagcagattgagtgatgctggggcagagaggcctgggaggaaaggtgttcagccagtcgtttgtaaggcgctcgtcggcacctgctgaaacgc

SEQ ID NO: 562 - DNA, 499 bp, Homo sapiens
  source 1..499: mol_type = other DNA
aaggccctggcagccatccctggagccctcactccctcccactctgtgctttccctccctctcctccttctcctcctcctggccctcagcccagcatctcacaccctcagttttcaatccctggtaagattgctcaattctgttttgttgtgtggatttgagtttgattttggtagaagtgtagttgtgttttatgttcaggtgtctcttgatcacagtaacccatagtcccccactggggggacggtgggggaagactttgggaggattttacccagaatacttgccgcctgctttttgtcctccaggaaaccagaagcccgggtaattaggtaggccggggagcagcgttgagtcagatggaatgcaggagtgggaggcctgtgctgattagcccaagccctttgctgttacagaatgtccccaaaattgctatatgaaagcaacccttcgattcacatatgataattttttatttctttttataatgtattttata

SEQ ID NO: 563 - DNA, 499 bp, Homo sapiens
  source 1..499: mol_type = other DNA
gtgagcactagtgacgcttcccccatgaccctgcctcagcccccacccaaaggctggctcccttaaccccagtgaactttgtctttcagctgatgaccagccgccatcaatcctggaccccccaggttaggagttgggccagttatgggtcaggccctttagcccacgacatccacacagtctgggtttcatccagcccaccccatcctacagaccaggtgcagtttgagaagtgtggcaagagggtggatcggctggatcagcggcgttccaagctgcgcgtggttgggggccatccgggcaactcaccctggacagtcagcttgcggaatcggtgaggcacaactgcctgtctcccacagagaggagctgaggttgtgtcctctgtggttatcccactgggggctgggaatctatccctgcccccagaggtcctagccagaagatggcaggtctagcatctgtcccaggagtctgttacctgtcctaattccccact

SEQ ID NO: 564 - DNA, 499 bp, Homo sapiens
  source 1..499: mol_type = other DNA
ggaggctggcgggctagggctgagtggagcgcctgcttagagaccttcgggagaacttctgccggaaccccgacggctcagaggcgccctggtgcttcacactgcggcccggcatgcgcgcggccttttgctaccagatccggcgttgtacagacgacgtgcggccccagggtgaggcccaagcttgggggctacagagccgggctggaagcctggaaccggagggccggggcgaggtctcggcctgatggctgcccgcacccgccacagactgctaccacggcgcaggggagcagtaccgcggcacggtcagcaagacccgcaagggtgtccagtgccagcgctggtccgctgagacgccgcacaagccgcagtgagtccctggtgctcccggccccgccagggccctaaccctggggcggcatgctttggtgtctgggaccagagcctggaaatggttgagactaccctgccacgattttgctcccgcttccgccta

SEQ ID NO: 565 - DNA, 499 bp, Homo sapiens
  source 1..499: mol_type = other DNA
acatcccattgccaccagccccataaagggcttccctggacgtgcccgatttccaaagcctaatctttgtagtcacatctccacctctatctgccagtgttggggcccctctggggcccagcagcgctaagacaggaggaaggcacggggctgggggagaaggaacccctagaccctgctcaccactgcccttcggcttttcagccacaccggtgagccccgccatgtcctacctgagtgagtacatgctggcagctgccactcctcccactgcttagagcctgcccctgccacatgtccctccaccgtggctactcactcagctctccgggatgggcagatggacaatgtgccctgaggagattgcggggtgggagggcaatggcattagcgagcgggaaggggaggggaggggcataagctgaactcctatgggggtcgtcgggcgcctcccagggccacttgcttagctcagccctctctccctttgtatctgcag

SEQ ID NO: 566 - DNA, 499 bp, Homo sapiens
  source 1..499: mol_type = other DNA
tgagtccctggctgctcctcgggaaggctcaggggcctgggcacgtgctcctgcctgtctcggagtcgagcccatggaggccagaaggctgggggaggccccaggtatgatgagaggccccgggagtcagctccttctctaatgtgtcaccagtggacggggatccccacttcatcatccaaattccggagaaagacgatgccctctgcttcaacatcgatgaagccccaggcacagtgctgcgccttattcaggatgcagtcacaggtgaggcttgtgggctagggccggggccagggggctcttcctgggagggcttgggtcccccgaggtaggcacagggaacaggttctcactctgcccagtaaggcatcatcttcacatgcaaagaaacccctgggggtggggagtgcccagggccacaggcttgctcagccccacatgccagtgctattgggagatgattagcgtgaatggaccacctgggcctagggtagga

SEQ ID NO: 567 - DNA, 499 bp, Homo sapiens
  source 1..499: mol_type = other DNA
gtgacaaagtaggaggtggggggaggggagattgacagattgggctcagtcctggctgtggagggtagtgccttgcccagctcctctggctggtgacagccctcgggcctcagttcagttgtatctgatcaggacttgaccacacagaggcttccttttctccaagaagaggatggaatagacaaggtagtttgagggtttctgccagggggaggcatgacatccctgggggggagcttgagggaggtccattattgttcatctcccagctgttgggggagaggctccccaagttggccgggtgtggggagaggggacatagctgccctctccgcacccactcctgggtggatctcaagccctggctgtgaagacccacaccccacctgagagaagactgcatctgtcgatttctccaaagctggagctgctggctcccggatgaatttcagacctggggttctcagctccaggcaacttggactcccaggacctcctg

SEQ ID NO: 568 - DNA, 499 bp, Homo sapiens
  source 1..499: mol_type = other DNA
tgaggaaagtgaagccgggtctcctgtctccccaaattcattgcacctacgatatagtccaggattgggtagcaagattaaacacaagcgcttcaaattgatgaaaaccaccctgacggtgtctgtctgtgtctctgtctgtctgtctctctctctctctttgttttatccagaaagtagaaacaggaatgtccactcaggtaagcagcgaacatcctcaaaggctgtgctgggtggtggtctgctaacacagggtccagggcaccagccctgtgaggttgctggccagggcccaggtccacccaggcctctccagcccatccctgctgccaggaggcagtgtaatctgacccagcatgctggtgcatttagtcgcctgtgcattcaaatattggctgtgcctcaggccctgtccccagcactaagaatacagtccccatccaagtggggccacaggaaggtgggtgcaagatgcaaacccaggtcccactgatttcca

SEQ ID NO: 569 - DNA, 499 bp, Homo sapiens
  source 1..499: mol_type = other DNA
tttgtgttagaaggggaacattttaaagaacctgaggaaagtaccatggactgcattcagagctttcttttgtttatctccttagcatagctactccttaacctggggtagcccagtaaatactctaggccgtcctaaaaacctagagttaaacattagagtgtgaaggggcctcacatcggtcccaagtcatcccctgcttgcagcagggaaggatgacatccagagacagatggagacccacctgtggtcttcaagtgaggttatgcactggcttgaggatcaggtatactgatggctaatccatggtccgtcatagcctacagtgggacagcttagttcccccctaagctgtgaagcagaaccagttcatcttttctttgaaagtttgtcacttgtatatgcatttaaggggaaaatggtgttctgcctaatttggcaaaggaaagcttgtggtttgccggcttcaacgtgacgcttggttttttctctcccacag

SEQ ID NO: 570 - DNA, 499 bp, Homo sapiens
  source 1..499: mol_type = other DNA
taggtgcattagagaatgggtatttggggctttacattgaaagcacagttggacttttaggaagcctaatataggcaataggtcatcgaagaccagacacagggtgacccattgctttattggctgatgcagatgaagtctctgtctgctcgaagcagaactctggggctctgtgggaatgaggccgtgtttcagacaggctagcctcttggccagtcaagatgggacttgccatacaaggtggaaagtgatgcctgccactctgcagagggagatcaaggccgtggaaggaaggtcacttagagttgggaccgagaagcaaatgtttcataggagagcgggtgtttgagatggtggcatttgaagaatgggtaggcttctgcccaaaaaatgtgggtaggaagagtgagctggaggagagatggcaccagcaaaggttaggaggtgggaaagtgggggctgtgtgggccagctggctggaatccagggccaaagcctg

SEQ ID NO: 571 - DNA, 499 bp, Homo sapiens
  source 1..499: mol_type = other DNA
gtgaggactgctgtgtcagacgaattcccatctagcaggggcaggctctggtccctgagtgggatgagtacctctccagggagggggaggaggaagggcatgtgcaggctaccaccacttacagcattctttaaggcctttcttcagccctaagtatcccttttgctaaatctgcctgggtaccctgcatgtgggccttgggaattgccacactttcccattaataacagatgccaacatttactgagtgaatagctagtgccaggcactgtgctgagacttgacatggacaagtttatttaatcctcccaataatcccttgaggtagctacagtacctttctcattcccactttgcaattgagaagtgtaaggcatagagcagtcaggattgtttcagttgcaagggacagaatcttaacatggctcatgaaaaaaaggagcaattgattggtttgtgtaactgaaatgtccaggagtacttcaggcatagctggatc

SEQ ID NO: 572 - DNA, 499 bp, Homo sapiens
  source 1..499: mol_type = other DNA
ctggaatgtgcctgcgagctggaatgtccagcacaaatatcttggttaaggtacaaggacatagaatgtactatgtgcctgtgagcatgtctaacagctacataggatagagcttaacaaagagttattagcacaaagcaaggagacttgaaggaagttagtctttaaaggaaactattatttctaacacttatgatttattctttaataagaagggaaactttgaagaggaaacttttttactttctacaacagtctaccagctttctcttagccatgaagggcaactgggagaaatgagtctttcgtgtactaaaaataggcagcctaatgaccccaagatcattaaaatctcggccactggctggaccctctgggaactggggacccagataatgcagcctgtgccttctggaggggacagctggtttccctccagcagtgtttatgagaccttgacaggggaagtgtgtgacccccgcctctttcctgtttctca

SEQ ID NO: 573 - DNA, 499 bp, Homo sapiens
  source 1..499: mol_type = other DNA
gtgagtgcccccaggagctgcccctccaggccatgcccccatccccaccttcctcctggccccggcagctccagcccagcagccctagattgtttgtgtcctgcagctgaggctgccaaagccagaagggagagcctggaaggggaatgagggagggagagcaggggaaggagggggtgattttttttttttttttttttgcacacacccttataaggctactgaagtcattaccgatgtaataaaccaactaagcaagcgagcgcctctcaccaatgttcccatctataaacacagcctggccggcctcccccatcccctcccgctcccctctaccctcccaccctcagggatttgctctcccctgaagtttctttcttacccagccccttttcctcctgctactttcctttttccctacactggttgcagggggagggagcctgccagctgcgaggacctctgtggtggaggagttggtgctgatggtggtggtagt

SEQ ID NO: 574 - DNA, 499 bp, Homo sapiens
  source 1..499: mol_type = other DNA
tgagtgggggttaagggtgcttccattcccgagcaagagagggaaaggaactacttctgtgttaagggatcatggagtcagagtcaaggtcactgggcaggcccaccaccagggcctatctgtctagaccaacctgctacatcacagttcccagcagggttagcctttctccttccccttttattggttgagtgagtgagtgattgattgaatgattatattatatacttacagaaaagtgttcctatttctggatgcctgccttagctgttgtccagacattctttttttcttcttctttttaaataagagctgagaaaataaagggtgaccacacagtgagagggtcctgccctaaatctaaggctggggtgaatgtctcagtcaagccggcgacttccatcttccccgctggccagcagcctgtgatcaagtccacactgaacaggccctttgcccagagggcctcttgatctttattgatctttggaattcttca

SEQ ID NO: 575 - DNA, 499 bp, Homo sapiens
  source 1..499: mol_type = other DNA
tcgccgcgcccggcagcgtgagcgcagagccggcctcgaccccgagctcggagccccgcgggccgcgcccgccgccggccccacccatccgggtcgaggaggccgaggccatggctgagacggaggagcggagcctggacaacttctttgccaagagggacaagaagaagaagaaggagcggagcaaccgggcggcgagtgccgcgggcgcagcgggcagcgccggcggaagcagtggagccgcgggtgcggcgggcggcggggcgggcgcggggacccggccgggtgacggcgggaccgccagcgcgggggctgcgggcccaggggccgccaccaaggctgtgacgaaggtgaggggccgggaggccggcactcggggcccgggccgcgcgccggcgccccatgtgcccgcccccgcctgccggggaagcgtccgggaggggccgcggaggccgggcggacgggcgcgggccgccacgtgacgcaggctctccacctc

SEQ ID NO: 576 - DNA, 499 bp, Homo sapiens
  source 1..499: mol_type = other DNA
tctggggccgcagtgcccagcacagagcagcgtttatcgggtgacgtctaggctgagtaattccgtgtgctgacctcagcccagtagtttgagctgaattttcgctttcagcagccgcatttgtagcagctcttttgtgatgacttagtctctaagcccgtgaaagaaaaagaaaactctcggtggcaaggttgaagtagaaatgtagttgtgaaattcctattgacttcttccttcggcttttcttagttgcttaaagtaacagctcccatgcaggaacccagcggaagtatagtgttagcctacgagcatgtttgtcctccatttagcctagtttgccccagaacgaagcaagggctttgaccagaagacaagtacatacttagtttaggttccagccacttgatccacttttcgtagtgtgttatttgcttagttatatgtctacaaatagctttaattgatcaaatggcgtttgttttacaggacgaagatgaat

SEQ ID NO: 577 - DNA, 499 bp, Homo sapiens
  source 1..499: mol_type = other DNA
gtatgtataatttttgtagtgctcagcagtattttaatcagatggaaatttgcattatccaatatctagttccttctttatattgatcatgttttagtggctcaaagaaaaaaaaactgctctattaccctatcttcaagaaagtaataaagtgaattattttgtataattttatccttctatacatcatataatcataagctcttagatttgaaaagggcttacattttatctggtcaatagccctacactttacccattgttcctactccacatttacctttcaaagatgagtaaaaaaaggagccaagagactaaatgagttagccagggacaccacagtcagctaatcacctccagatcaggaaatagcatttaaaccacagtcagctaatcagtggcagagctggaaatagaatccaaatctgccaaatcgtagtgcagtgccctcgctttggaagtaagaagaaaagatctcagtcaaaatgatgcctgttct

SEQ ID NO: 578 - DNA, 499 bp, Homo sapiens
  source 1..499: mol_type = other DNA
taaaataatataaaatggggacactccatgtgaggttcaccctggcttgtttgttctccttaagccactgagagacttcccttttctatggctggtccgtgttaatcgttctgaacttaactaaacaactacaggctatggatgacatgtagagagaccagtgagtagggacttatctaggaacaatctataagcacagcttcttctgatgtgattactacagcaagtagatgttttgtttttctgatatagcagacaacttttttaaagtggtactgaaagaaagtgtttttctaatatggacaactctgctaatatccatccgatcagatgcagataagctaatttcagttggtaaaatttttttgattctattgactttcaaaaatatattttggtatcaattgatgcattttaatatctatttcatcagtttattttacagtggtattttagttctgttatttctgtcttctgattgctttgttttatcccaaca

SEQ ID NO: 579 - DNA, 499 bp, Homo sapiens
  source 1..499: mol_type = other DNA
gtgtgtctgtttttagtgtttggttatttaatagatgatgggttatgtaaaaaagggatgaagtatactctccaaggcacggtgatggagttactatatgtatctctgactttaaaataacttggtttaatgaacacattatttttaagactttcttctatcaagtttagatatgttttgaactcttactatatgaccagtactttagtagttaaataaagaaaactaaaatatagatttcaccctgtggaaatataaaatagaaaaaggaaactaaaatagagccctacttgttattcagataatctttgtggaattaattaatggacaaagaaataaatatatcaaataatcataatgtatggaactaaaaaataagatgcataaattggtaaaaacagatttattgataaataatagaaccttgatttaaatggagaaaaaaactccgaagtttacatatttaaaaacacaataaaaaatttctaaatattctgaa

SEQ ID NO: 580 - DNA, 499 bp, Homo sapiens
  source 1..499: mol_type = other DNA
tttcctggagtaatgagattattacataataagatttgtaattaaacttggtcttaaactcaagcagtattaataagagtatatagaatgaaatagatgcaaaagatgagtaagtgatatgattccttattgtgaaatttttgggcctaggataagggaagataatgaaacaaaagtaacaccaccctttgagcacgtttaagtgtgaatgaagatatattttattgaaataaaaaatttcttcttccaatatgttaagcagaaatgcatataaaaaattcaactttaaatttcaattcttacaattttaaataacatagtggttctcagtgctcaaaccactaagcccagttcacatacgtttcatatcatcaatatatatccacattttttctgtcttaaattctttaaagctcttgtgaacagtgttagaaaacaatattctttttaatctaacaatgatttcaattttactataatgtctctattttattattta

SEQ ID NO: 581 - DNA, 499 bp, Homo sapiens
  source 1..499: mol_type = other DNA
gtgaagttcactttataacctacagacagtgacacctcagctctgcactgggccttcctgctccgtattgttcccttagggattttgaggcttgggtgggggttggtgagtgggaaactaggagcccagacccacctccaaagttcaatgggactttgaaccccagaaagcttgatttgtttgttctacatgtcatggactctagcctctaaacacggttaagtttttctggtagcttattaaaggcttagcttatgaaaattctcccagaaaacagcaagtttagacacccccatggtgacaatccagctgtgcaccatgagaactgtacaccaaattggccagaatgagccaggctcttgagaaccacagtccttgcagtaatgaacttggcagttacacttagaagttcatattcctatcagttcaaggaaaaaaaaaaaaaacacttaactaaaagtaaggagccatagtttcaagtcttggctcccactaactt

SEQ ID NO: 582 - DNA, 499 bp, Homo sapiens
  source 1..499: mol_type = other DNA
aaggggttttagagaataccaagtccagcctcctcattttatggataggaaaacagaggcttagaaggggagcagagaggagggctggctaaaggcaccatagcacatagtggactaggctgggctttttatttattcgctgttcttgattgagcacctactatgtgacagcattgctataggcactgtgatatagcagtgaccaagaatgagattctgctctcatggaccctaggtttcagactagttgagggtgggacagaatagaaaactaaacaagtaagccagtaacacatcatagaaaccagtgcccctagctctgctgcaggtaatctgtagcccagctgcctttcacgtcttcctccccaccacaccacctttctctgagaagaacaatccagtctttcctccacagaagaggatgatggagctgcaagctgcacccctccaaacaccccacagatagcttctctgttctcacagtatcttctctcctcca

SEQ ID NO: 583 - DNA, 499 bp, Homo sapiens
  source 1..499: mol_type = other DNA
aacccaaaaggacctggccccagaagcttctctctaaactgatacagcatcctggctcagaagtttaagcaaaagagacattttgttttgaagagagatctataaaaagaagccagtattgggatttggtctagacaatgggatagtgtgtagcgtagatggtatagtatagtgttagaatcttaccattaatactttgtaatcactgcattataggtggctcagcttatcaaccttcctcgccctcacctgtagtgggggtctgtggttgcttacttgtctgattcctacacagtccatagctcttgagtcactctcaaatgctttgattttcttctctctatttctagtataagtcatagtagaacagaagatgaaacaagaactcagattttgagcatcaagaaagttacctctgaggatctcaagcgcagctatgtctgtcatgctagaagtgccaaaggcgaagttgccaaagcagccaaggtgaagcagaaag

SEQ ID NO: 584 - DNA, 499 bp, Homo sapiens
  source 1..499: mol_type = other DNA
tcagactgtgtctaaaactttctttgtgtctctcacctaacacagaatcccagaaaatcccttcaaggatgttttcaatggtcttgagaaaagtaatgatgagttatcacacatgaaatcatgaaatcaggtcattcagaatcctcctggctcctagtctatagagtgtgtaatatttcttcaaaagtgaataacatagcacataattgttacattttacagagacttaatgcttttttaaagctgatgaaaaacaggattcacctcaaactttcattacaactttaaaactaaatagcaaaggcctgaaatgtatatgctgcgtatgaagtactagtgaatcagttcagggtaattcattgcttctgctcctcagaagccagtgtgaaaaggaaagactgaagtacatgatgtaaggcagtttcccaaattgagttctcgggaacactactaagaatcagtattgtcctgcaatgcattattgtactctagaatcaga

SEQ ID NO: 585 - DNA, 499 bp, Homo sapiens
  source 1..499: mol_type = other DNA
atttagaattcaaagaaagagtcttaacaactaaaaaaaaaaaatgaaaaaaaattatttattgtattttatgtcataaaaagaatctggaaaagttcagataaaattgcactgttactgaataagcaggataggtttaaaatttggcctccataattaaattcaccttaatgaatatttttagaaaaacggcattctttttcagagtgtcaccttgaagacatgtgtttattctttttttaaattttcccaaaatagctgctatgctccttgaaagtctaggggtaagcattttttatttgctatgtattctttatgtgattatttaaaattagtgtataaaaatggttttcttgataaatgtggcttatctaaattagtgttaagttttcttattgtgtttacatgacatattttttgacagtactgctgagaaatataaatattaatccccttgttcttgtactttcttttctaactatagttcttaaaattatag

SEQ ID NO: 586 - DNA, 499 bp, Homo sapiens
  source 1..499: mol_type = other DNA
tattgaagttctctcatttgttcacgtaaatcttgttcattttcaaactatattcttgttatccaaatcaaagcggtaaacttttgttgcagaagtcttgaagccactttctctgtctgtcttggcaaacagatgtagtattgactctcctgggcagaattcatcctgtgtgggatagattctgactcatagcaggctcctagatcagttcctgtcccctagggaggaatttcctaggggcagggcaaagtcagatattggaaatgttatctgcataatgtgagtaattaaggcttcattgtataaattatgttaggtgcttattttgacattatgtaactcttagtgtagtctataaatacactaaactcttaatttttcctgtgctataaaggagcaatgacgtagaccagggatgtccagtcttttggcttccctgggccacactggaagaagaattgtcttgggccacacataaaaacagtaacactaatgacag

SEQ ID NO: 587 - DNA, 499 bp, Homo sapiens
  source 1..499: mol_type = other DNA
gtatactccagactccatgtcagttttttagtatggccctatccctttacccactcacatagtttattttttaaaatattttttgtttctttaaccatatacttgcaacaatctatactatacccactcacgttgtacgtaaatcttcaaaagccattaagttttagtctgagtttatatactcaagttttccaaacttgagcagcaacagaatccaaacctcagcacaatattactacttttttttccaactctccctagatcttcaggccttctgtaaaaactgaacttaaggacgttagtccttatttgaagatttggtataattctttgttgtaacatttgttcctgcttatctgcttttggggaaattttatacttcaaattctatttatttaatagctacagtgctatgtagattatgtgtttttttcttatctgacttttgacaatttgtgatgtgtgagaaacttttctaagttgttgactttatgaatga

SEQ ID NO: 588 - DNA, 499 bp, Homo sapiens
  source 1..499: mol_type = other DNA
taatgaaaatatagataaaacagctgatattatatacaaagttaacatcatctatgctacagtacctaatacaacacgatagccagttttagacttactagttattgatacctctttggcatgaagaaaacatttaaatagtcatttatagcaatgcacaggtataataaaactccaaattattaaagagggtattattatctctccttttggagatggagaaagtgaagtacagagattctgagatactttcaaagtgtctcacaatgcttaagtgatagagttagcatttgaactcagggtggctaacctcagaatgtgtatccttgaatgttacacaatactgactctagtaatgtggtgaaatgcctgtgattgtttcagaatttatctgcattacataatgctcaaaaatgtcttgaaaaactggttggcaaaataaggaaacgtagcctttctggagactctaatatttccctatacttaactaaatttctca

SEQ ID NO: 589 - DNA, 499 bp, Homo sapiens
  source 1..499: mol_type = other DNA
gtaagtctcgcccatcgctgccgctgccactgctggggtccccgactctcccgctgccccaaaccctgtcctcagcccgacctcctgtctcacgagattcccttctctctgcagagccacactcaagaatgggcagaaagcttgtctcaaccccgcatcgcccatggttaagaaaatcatcgaaaagatgctgaaaaagtaagttataatttccatgtacacaggcgactggagctgttggtcagaaatactggcgtctgccccctaaaaagtaaatcaggaaaacccagggttagctgcaggactgaaaaaattattattttcacaaagttgccattaaggttattaatctgttctggtgccagaggatattcccagtgcccagggtcaccacccaggttcttccctcctgccagtgaatgtaggtaaaactgctttcatgtaaggtctcattggagtttgccagttgtgctgaagtgttttccacctgttaaaaaac

SEQ ID NO: 590 - DNA, 499 bp, Homo sapiens
  source 1..499: mol_type = other DNA
attcggggcagaaagagaacatcccacagttggcgggagttacgcaagacagtcagacccggacgtcactcgtgagtgccccgacccccctccaccccagaggcggggccatcgccttccttccgaactcgggatcgatctggagctccgggaatttccctggcccgggactccgggctttccagccccaaccatgcataaaaggggttcgccgttctcggagagccacagagcccgggccacaggcagctccttgccagctctcctcctcgcacagccgctcgaaccgcctgctgagccccatggcccgcgccacgctctccgccgcccccagcaatccccggctcctgcgggtggcgctgctgctcctgctcctggtggccgccagccggcgcgcagcaggtgggtcccggcgccctggggtccccgggccggacgcggctggggtgggcgccccgcgccgacagccccgctcaatcagcgagtctcttcttcccta

SEQ ID NO: 591 - DNA, 499 bp, Homo sapiens
  source 1..499: mol_type = other DNA
gtaagtacagcacagaacacccaaatactaaaacaccaatagagcttttttttttgctttttttttttttagacagagtctcactctgtcaccctggctggattgcggtggttgcagtggcatgatcttggctcactgcaacctccgcctcctgggttcaagcaattctcatgcctcagacccccaagtaactgggattataggtgtgtgctgccacactacacccagctaatttttgtattttttgatagagacaggtttccccatgttggccaggctggactcgaactcctgacctcaagttatcctcctgtctcggcctcccaaagtgctgggattacagtcatgagccaccatgcctggcccaatagagctattattatggagcatctttcagttgtgaaaattggcatggaaactctccatccctggggagaacagttatttcctctgttattttcctacccagtctataaaaagagagtgattcattttctct

SEQ ID NO: 592 - DNA, 499 bp, Homo sapiens
  source 1..499: mol_type = other DNA
tttacccagaccctattcaagatggagttgctctgatttaaacgcctctgacaaaatgacgacctcaaaacaatccagctttatggaatacctccacaagaaagaaagtatacttagctatagaattttctccttgcatccaacaggctttgagatgtcagatgtttccttcctgtcccatgattaatcctagccattcctctttcttgtctggctccactactccttaccatctaatgcctcgccaccattttgatattttgactaagtgagctatgaaacacacctactggatatgaaagtataagtttctgataacaaaacatcaacatgggatgtggaggaagtgggtagggtggcattaatgcagcaaatcctggaatattttaaatcttcattctaaatttagtaaaaatataggataattttcctgccatcatttacttataaaattaaaattttagaaaataaaaataatattttcctctttttaatcaca

SEQ ID NO: 593 - DNA, 499 bp, Homo sapiens
  source 1..499: mol_type = other DNA
gtcagttttttttttcttcatagctttaaattcttttcctagtagttctgaaattcttagagtgaaggttattgaaaagaaataaaaataatttattcaaccattgaatccctagagcatatccaaatactacataaaaactattaatgacttataaataatttatataaaaaggtaattataatttgcaaattgaaatttaatttgcatttgaatgaaccaacatggaggaacaaaaaataaacattgaccttattgagataatttcttatatagagtggaaaataatcttaaatttttcttataaagaaaaattttaaaatagatataagtacagaaaattaaagatggaaggagtttaatctatttgaagcaaaccaaatctgacctaataatttcattcattcagcaaatgctgattaaactacttcgtgtcaagtgccatgtctttattttgcattttgtccacattacaggttggaaaagtgtagattctatc

SEQ ID NO: 594 - DNA, 499 bp, Homo sapiens
  source 1..499: mol_type = other DNA
tttttttttttttgagacagagtctcactctgtgacccaggctgcagtgcagtggtgtggtctcggctcactgcaacctcctcctcctcccgggttcaggcagttctccagtctcagcttcccgagtagctgggactacaggcaggcacaaccacacccagctaatttttgtatttttagtagagacggggttttgccatgttggccaggctggtctcgaactcctggcctcaagtgatccacccaccttggccacccaaagttctaggattacaggaatgagtcacctgcacccggactgtgctgaacattctatttgtaatggaacactgggccctcaaggctcaatctacaatgatactatgatgtcattagcttgaatcccattatcttacatgcagagttggattaatttttttctaaagcattgtacattgccacactggagttcatattctacttttccactgactcaagtattcttttatgctccatcaca

SEQ ID NO: 595 - DNA, 499 bp, Homo sapiens
  source 1..499: mol_type = other DNA
tttgaatgtcttgttatggtgtagctcgttgcaaaattcacctaattttatcacaaatgcaggaactttttttccttcctgttaatatacagtcaaacatattaccaagtactggagactatctatatcactgtataaccattcactgttgttgccagcttcaagaccacatttgaatcctatcaggcccagtaaactctgtgaatagactctgtgaactgtctctaagtctcactgttttgtccacattaagtgtcttgtttgaagcacaaagtaaaatctttctttccaatccctgtcactgcacctccctagacagtcactacatggggcagtttatggacttcagcaatgtttacctaactccagatccacactataggagtccagccttcagggagaactagttttttacattttttgcctgcataatgagaagctttaagtttttcatatttttacctgagaacaagaataattacattctaggctatcaccc

SEQ ID NO: 596 - DNA, 499 bp, Homo sapiens
  source 1..499: mol_type = other DNA
aaaatacataatcctgaaagtatttaagtgttcacctaccgttacttttgccattagcattgtatttccaatatggattttttttttacatgacatattaatggaagtcagcttataaaattgtagctcaagtttaaaaacataagaaggtagttcacaaataggccattgttgtatttgttgttctactttgggggagaagaggaattattcataggattcctaattctgaatcctatctttgacccaaaaaacagaaaccagccataacccagaaactggcattccccacacgagtataagcttgcttacctactttttacccttggagtttcatgtcattttaaaaaatcttcccatggcttatttaatcttctcatttttcacctaaagagaaaaaaaatctagtttactgctctacaaagtgagaatttgaaatccaaaacacaaatgttgctctaaaaatgttccaaccttttttctcttcttctttttttca

SEQ ID NO: 597 - DNA, 499 bp, Homo sapiens
  source 1..499: mol_type = other DNA
tacttgtgtcatctttgccattgagaaaagctatttcctatgacttcctgcatttttggtatcttcataatctttagtcatggaatcccagtggaggggacccttcacttgccctgaatatacacatgctgggctattgtgcttgtagtctcctgcatctatctcaattttcactgtcggcattttcgcctttttttttttttaataaaatataccgaattcctagggtaaaagctgtagtagggtaaaggatatactcatatttacaagtggtgaaagtccaagagttgtaaatccaggaaatttcttaggaactcaaataaaatgtcacatgttttcttacagtgaaggagaatgtttttctgacatttatactatgtctttatggtcaatatacaattgatttttaaaaataatagctgatttcatgcttcatatgactaaggtacaattactaattgcaaaaactgaactattcctggaattatgttcaaaaaat

SEQ ID NO: 598 - DNA, 499 bp, Homo sapiens
  source 1..499: mol_type = other DNA
actctatactagatatgcgaccagaccaagttacaaatctttctaagtctcagtgtttataatctctaaaatcaaaataatatgaaaatctacctcctagtgttgatgtttaggttgaagtttaagacagaaaatgcatgaagaatgtgacaaatagcaaaaacttatcacaagttattatccattgttgttttatattccttattataacaggaacgtgggcacacaacaatgattttttgaagatgctaacgtagtattgaagtctaaatgacaggcatactcagaatgttgtgagtgagcttaaagttgaagaaaacacaagagaaaaccaaaaaagatgagctttcctttgacttcacttgacccgaatgcatgggggtgggattagagtggctgagaacagacagattttcactaagtcatttcaaatgctccttggactctcacatggaagcatgtctaaatgctaatacaatgtctcttctttcctattgca

SEQ ID NO: 599 - DNA, 499 bp, Homo sapiens
  source 1..499: mol_type = other DNA
gtaagtgttaagagatcttttcaactgtaaaatataatatgtcaccttggatgagtagctgtcttctttaagcttcatctgtaaattgaggcttataaccacggcatgatatgtgctcgttttgaagatgaaataagacaatgaatgtaaaccatatgatacattaatgcaccgtgcctggaccacagaattcaatccaaatgctagttattattcagcacgacacttttctttcttctggctcatgtaggaaaattttaataaacctcttgatgaatagccgtagagatggggtgaaaaacccccagaggacagagaataggtaaactcttttttcttttaattattttcttcctaattccactgtatagacagaaggctgaggccggggtgctagagaaccttgccgtgctggaattcacgttgacgcccccacggagctctgctgcagagccctcgagtcccgcacttccggccgccaggtggcgctggttctgtt

SEQ ID NO: 600 - DNA, 499 bp, Homo sapiens
  source 1..499: mol_type = other DNA
ttttggttttaaaattaatgacataaagtttaaaggattagttttaaagggtcaaaatgtattgtctgttacctataaatatttttactggtctttagacatcagattgaactgaattgaatgtacaaagatctggctcaactgtgcaagataaaacctattcctcagaacgatgtctttaataggcaaaaccaaataaattgtttactactaccagacacttgtttaagcttctcagcaaccctataggttttatgttacagatgtaaaacttaggtatagagaggttaagtaatttgcctagaaatcatagagctaaaaagtggtgagcagaatggctttgaacgctgattctacagcttatggtctagggtggtccaagtctgttaggtgggctaatgaggatcactagatctggagtcagaagacctcaaactgtatcccacctctgccatctgtgtgatcttaagcctacctaaggcactaattctacttcaca

SEQ ID NO: 601 - DNA, 499 bp, Homo sapiens
  source 1..499: mol_type = other DNA
gtataatatcactaactcacacaatgtcgcacttgaatggcttctagctcttctgactgtttttgttctaaacgtaaaaagcaaaggaaaatgagatcttgtaggaaacattttaaatgtgtaattaaaaacagcagtcacttgccaaaaataggttgagtaactgcgagtgttaataactattcacgtttttgttatctcatgaacttaagtagcataatatttcattaagataactcagaggttttggggtttttttttttaacctaaaaacttttggggtaggggtacaggggtacaggatgaaaaaagggatttgtaggaaactgaatcttcattaactggattctttgtcaaaggttgtgaacagaatgatagaacattagttttgaaagagacctttgctttcctttaatccaatcagcaaatacccttctactatatatatttaaacataccaaaatcttgaccaattaagattcacatgtacccacagata

SEQ ID NO: 602 - DNA, 499 bp, Homo sapiens
  source 1..499: mol_type = other DNA
tttactgcaagaattattcaagctctctttgggaattataacagctagaagatggtaaaacttaaatgatattaacttaaaagtatgttgtaccatagcctttaatcctgacatggagctaatccttgactctaaaagccagatccagtgcttatagatttagtataaattgaatttaaatggtataaacaaagttgagttctgtgcctgagttttcacaaagaaaaccataaaatgttaagtattaagtcttccatgctttcactaaaacagtgatacctatttctaagacagatccctggtcttcttttgttttgtttcgttttgtttgttttagtttgagggtggtgtgaaattggcaggtgcattccatgattactaattctaactgttcatctttctcatggatgtctggcacatttctcttaaaacgcatgatattgcacgtgcttttcccgttgccttggcctctgctatatcatttttttgcttccagata

SEQ ID NO: 603 - DNA, 499 bp, Homo sapiens
  source 1..499: mol_type = other DNA
gatatgtacacaactaaaacaaaactaagatataagatcatattaatgtaatgataataaaagtggattgtctcctgttctaattttaataggcacaaggcatttttgttaatcacttcttattaaagaattttttataatattcaggaaaatacaacaaaaaaacccttacattcctaaggcctcagagtcagagtaatataaaggaaatgtaaacacatgctgagtaatgcaagcatttggcaatggtggtgactggagctgggagcacagcttttatttctctgaaataggaatttgccccttagagttagaccaattttgccttcctctaaatggcaaacagtttggagatactttaaaggacattttttcacttaggatgtttagtactatgaataataaatagtcacaatttccttaactatggtgacaaaatacaagcaaatttagcctcatgtcatttcctaaggaacatcttctctctgtgagttcacag

SEQ ID NO: 604 - DNA, 499 bp, Homo sapiens
  source 1..499: mol_type = other DNA
cgagtatgcatggaaaatcgcatcacaaaggcgagtatgcatggggagcacttgctgctgtactttcatcacttttatagtctgagttcttaaaagtttcgttcatttccctcaaaacacttgaacctgcagtttcagtaggtactgttctgccaggtgcagattagttaagagattagcagacttctctgcctatcttctcttactttaaaacaaatgttaccattgaatcaaggaagcaatagccatgagaaaaaagaaggatctgacgcctttgaatgaagattcaaaacatgatcttcatgttttgtattagcttggagtaaaatccacttgctggcaatatagcccttaagcttgttgcctcttctctttgtttcagaaactagagccctgtttattctgatcaaggctctggcccactgtctttatctcagataacccaccctcttctgcacacagcatggagctaagagaagggtgtctagttatgtaatat

SEQ ID NO: 605 - DNA, 499 bp, Homo sapiens
  source 1..499: mol_type = other DNA
gtaagagataccctacagactgtgtctggaaattgggaaaaccagtctagtgtaaccaatttgatggaagagctgagctttttgaagcacagacatgaaataaatgaattttccacataactgatattcctgtgctctgctgaattcctccttccccattgggtagcaagtttcttaattatctctcagcccagttccctgtttaaaatgagattgttcattataacagtctcattttggttttaaagacttaacttctgcacatgtaaaaactttaaactcagttatatcaacactttcctgttcctctcactcaagcccagggcttggagtggggtggggaaaacaggcaaaagaaaactggttggtgagtgaacacactacattggctacgtgccccctgtttttttctgatcttcatatagaaatgcttgctttcctctcttgggcagccatcattcagaagatctctgtgtgtttgacacagactccaacgatt

SEQ ID NO: 606 - DNA, 499 bp, Homo sapiens
  source 1..499: mol_type = other DNA
aatctttctagctacatcaattttttattatatgcttctctttgatagccctaagaaaggcaacaattctatatttatattagtgtgctcatttgattaatgtctgtctgcacccacaagactataagcttggtgagcacaggatctgggtcagtttatgctcaatctactctctccagaaccttacagagtgatgagaatatcatgtatactcaataaatatttgaaaaacaaatgaacaaaaatttcaacagttccattttctttagttatctgaacataatcgcaattttaggttggaaaatgacacctcatgtgcactggaaaggacctttcaggtggaatatttaatgacaatgtatttagagaagccaaaatgaatgatctaactccaagagataaatatgaatcctttaccactgcctcttctctgaattcaagcttatcacttagaatccatgctgtgcactgttcttttctccttttttcttttgtttca

SEQ ID NO: 607 - DNA, 499 bp, Homo sapiens
  source 1..499: mol_type = other DNA
gcaagtgcccattccagagactcactcacctgacatattactactggaagttgaaaagtccccacatttatttgtctgaactgcttaaaaagtcaccaacaggaattcttctcaaacttgccatccaaaattgaaccccgctggcccagtgttttgacttgtttatattccagatagccactcacgtaagtttatctttttaatgctgatgggggccaagaaaggagttcatttgcttcctggctgggaaattcaggaattgcattttgggcagcatattttatagtatgtgtgtaagtatttcactgcttttcctcagtttattttttgtgagagttcattgaaaatgtccaaggctgggcacagtggctcatgcctataatcccagctctttaggaagccgaggtgggaggatcacttgaggccaggagtttgagaccagcctgaacaacatagcaagaccctgtctctacagaaataaagaaggaggcaaaggcag

SEQ ID NO: 608 - DNA, 499 bp, Homo sapiens
  source 1..499: mol_type = other DNA
ctaggcaagctctgtcttcacctgaaaatcctactcaacactggggacagagatctctttagccatgggataccaacttttagaactagagctagaacttgagagtacactttgtcactctttcttatgctcctccaagaaatacacatttcctcagaattgtaagtgtaatcacattttataagctgaaatctcagagtacctttagccttcatgagcacaaccttgttggggatatttgggttgtatttgtttctcttttctacactcacatgtttgcctatcttgacagcctgttggcctaggcaataataaagcttctgtcgaggtgagcaaacagctgatggcataggcgcacagaggggactcctacagtggctggctgtaatctgccaggctggtggtcagagcaggcgagaacaaaagccagtctgtttgcaggcaaattggaaaatcaatgtgttagttgtattcttttctctttgcctttcttctgaca

SEQ ID NO: 609 - DNA, 499 bp, Homo sapiens
  source 1..499: mol_type = other DNA
gtaagcatatcatttttttgaaattagtgttttttaagtgccaaagaaagaagatatttagccgtaatgtttcgtacgatggacattgtcatgaagcactgtgatgctcccaagttaaacattttgtctgtttctaagtgacaaagccctccctctatcactttgctcttggtggatgcgctatcactctgtccttggttatccaaaaaaagttgcttattttctccattctgcattttattttgctccagattgtgtttttccaaattatgtttatttttccttcctgtattcactgtttctctatatgaataaccagattctagtgttgaagttcataagcatcctctttgtgtccaatttgctttttagggcagatttgatcatttgggttctctctcatccatttctgatgacttttgactctagttgaaaaagtttttaaatgcttttccttctagaacattattaaacatatttcataatcttctctttttgt

SEQ ID NO: 610 - DNA, 499 bp, Homo sapiens
  source 1..499: mol_type = other DNA
aatagatgagacccatatataatatttcactgatcattctatcaacgtatcccatctgagtttcattcttctttgttttccccacagtaccttgcctgaaggcctaaaacaaagtagatatgcaagaattaattgttgaatgattgaatcaaacataaatttcctgacaccagatatattatttaatgtgaatttattaacagtattaaaaattaaatataaattataattgatatatcagttggaattagatttgtcttcaaatgtcagaaaccaaaataagaaggtgtaaacaagatagaggtttatttctctttcttttcagcagtccaggacttgaatggtggctttttcatgaagtcttcagggacccagtcactttccagatcaagaaacacttttgaagtccagttttactaaacgtttactagcaggatatatttttactgagtaataagtatatatatatttgagtattgactctggtatgattgattta

SEQ ID NO: 611 - DNA, 499 bp, Homo sapiens
  source 1..499: mol_type = other DNA
gaatgctcaacgagcactgaaggggggacatgaggcactgcctctcacccaagagagcccccaaatgtccttttcagacttttatcacagtgacccactcccaccgcgcctttaccttgcctctgcctggaatgtccttaactccctcttgccggcaatttcaccagatttttgatttcttatccagtctcacgggaagcctttccggcatctcccaccctaccgatcttcccgtctatctcgcctgctacactgtgagttcagacagcacggattgaactcttcatcttttcgtgtcggcgtcctgcacagggccatcccatcactaagcgcgccacaaactcagcccagtattgacgcccacgagtcgcttgtaaagaccgtctgtgacgccggaagtgacgcgctctcgggcactatgtgcttccggtctccaataccgcaggagggcggtcttccccggctcgccaactcggctgctctgggggattcgtgcgcg

SEQ ID NO: 612 - DNA, 499 bp, Homo sapiens
  source 1..499: mol_type = other DNA
tgaggttctcagccaccaaagctgcagggtctcgtcgttcgttccctctggcctggcggaacttgcgtgggaagctgggaggacagaaggcttagccgctgggtccctgagctggctggagcgcgggctgtctaggggcggcgacctcagctgttgggctccggctgctgggggctgtgcgtccagccgccctggaatccgcctgtgggtgggccgcttggctctcccacttcaccctcttgataacccagagcctcccccttcccacgtacgtaggggaaggataatctacttccttttgaacagcttcggtccccactatgacagtcgcataaacttcagcgaagagtgcgctggtaaagtggcatggagtttctcacaccaattcattgggtccacccttcagcttctgtggaaggggtctttctgttactaggagctgagacttggggggttgccagggatgctggtcttaaaaggtgataatttaggccgggcg

SEQ ID NO: 613 - DNA, 499 bp, Homo sapiens
  source 1..499: mol_type = other DNA
gacgatctggggaactgtaggccttgctgaagcatcctcccacagaaaggagataagggccttatccaattggctgtacacaatagatcagtgcttctttcctagacaaggctgaaaggggccaacattatttctgaagacttcattattggaattctatgggagtgatctcactgagctattttggaatagaaatgtggctagttgcctgacctccctcaatggtttcacgtggctttcaaagggaaggaagggcagtgctgacttttggtaaaatgggcgaaagggtccatgccagcaacacaatcactcaaagtccagatgagggatcagtaaatacaacgtgcctgaaaggtggcccttgagcacattcctccggtagacattaacttattaaattgattctgattacaaatataaactttgcccccatctcacccagtaacaatgcaagagttgatgtcagtctataaaaggaagtaggaactgtccctggctt

SEQ ID NO: 614 - DNA, 499 bp, Homo sapiens
  source 1..499: mol_type = other DNA
taaggagggaaggatacttatgtgtgtgtgtggagtgtggagatgatagtggtggtggaacttgaaagctagattcagtcctgaggaatggttcctctgttctgagtctacagcatctgcggaatggaatgatcactcttccaaggtgtgcagcagggtgtcaacactttcatatctgaatgtctttgcccttacagatagatggctccccaataccagaagtgagttcggcaaagagaaggccacggagaatgaccccattttggagaggggtttccctcaggcctattggagcctcctgccgggatgattctgagtgtatcacaaggctatgcaggtactccctgaacctgggagcagggttgggccagagagccctgggaagctgggcagaggagtgacaaggggacacatgaacctaagaataaagctgggatggaggagttctagactgagactgggagctccatggaaaatcccttaggagttaggagccaag

SEQ ID NO: 615 - DNA, 499 bp, Homo sapiens
  source 1..499: mol_type = other DNA
gtaaggggcccgcgctccccggtttagatcactcggcccccctcgtggtaggccaccgctacttttgcacctctcccgggcccttaagtccaggtcctccctcttcgggctccaggtgctgccacccgactcgggtgctattgtggcaaagtgttcggccttcctttcccagggcccttccctgatttcctcttctcccttcatttctcagccaggcctcattaaaatggcctctcccttctgggcttctgagacccgggtgggtgaagtttggatgggacgggaagcagaggtggccagggacagcttctttctgattcctgatttctctgggtcttccacctgtcccaagatgacttctcccaagtcctctaattaccccggagcttcctggttttagctgttccaggacccacctataaactgaaaatgccaacgtacgcgcgatgtgaggggtgctgggtaggttttggttaatgaatctgcatgtgtatgtcca

SEQ ID NO: 616 - DNA, 499 bp, Homo sapiens
  source 1..499: mol_type = other DNA
gagaagtcgcggcggacgcccagcttctcctcactcgcaccggccccctcccttccgcctgccgccttccactccgcccctggcggaggaagtgatgtcacaggccccatgtgagcggattgcaacacatgcagctgcctggagagagggagccggtgtcctacgtcagagccgccgccgccgcggagccgccgccggggaggagcagccgctgccgcccaggactgggcccttaggtaaggcacagggagggaaaggccggtgacctttgtggcgagctgcaccggacgggaggagagggcctctgggggatggcgaggaagggggccgctctgccccagcggcggcgctaactctgtggtcttggtgtctccgggccccgccgggccgctctagggaggaggaggcgagaagatggcggacgaccccagtgctgccgacaggaacgtggagatctggaagatcaagaagctcattaagagcttggaggcggcccgcg

SEQ ID NO: 617 - DNA, 499 bp, Homo sapiens
  source 1..499: mol_type = other DNA
cattgctgtcttttattacatctttttatattaaaaataaataaaaatgtcataaatagtaattgtgtaaatataaaaggccttattaaaaaaacaaatcttagtgcctcagttttctcttctgtcaagtgggcacataaaattacctaagtcatagggtcctgggcatttaaatgagagaatgtacgtgaaatatttagcacagtggagggctaggcacacggggagactgcagtttaaaagactaaccaggcacatgagaccaaagacacaaaagtctgttattttcctagagtcaaaaacaaaacttattagaaggctgtctttacccaatcttgtcctcaaaattgactctaaatctttagttcactttaaacattcagtaaattattaacactgctttgaaattctctttctattctctctatcctgtgacctctgacatgatgtcacaattcaccttctgctctgactttgtgaggatttcccaagctggttg

SEQ ID NO: 618 - DNA, 499 bp, Homo sapiens
  source 1..499: mol_type = other DNA
tagggttgctgtgtgttttgctcttggtctaattcctttggctaaacatgaataattatattaatgaatggctttggagattcttcttccgtcctttgcatttttccgagatatgtttctggttttggtatctattagaagggtattttggtttctgttttgtgacaatcaagatttatagtacagaaaattagaagtgattatttctatttcaaggttctttctgtggcagccaggtaatcccttgggtgccctgatttactcacttggtttttttctctctcctgggtataagaccaactacataatttacaaagcccagggcaaaataaaaatgcagcctctcattcagaaattattaagaacttcaagagggtgagagcacagcatcaaatcaagagcagggcacttcttttttattttaatttttccataagttattggggtacaggtggtatttgattacatgagtaagttctttaatggtgatttgtgagat

SEQ ID NO: 619 - DNA, 499 bp, Homo sapiens
  source 1..499: mol_type = other DNA
gtaggttatatttttattcccattctatagctgggtaaagtgagttctaacaaagttacttgttaaaggtcactcagaggtcagagcatcagaaaaaaagacaatcacaaggctgatgttgtgtgctggatagtttaaactgaacaggaagaaaacatttttgtgggctttatctaaaaagaaatagtttgctctgagtttctcagtttcatttattcagcaagtatgtgccaagtgctattgtaggcaatgaagatacagcagggaacaaaacaaaactgacatggagcttccaactagaaaggagaacgagacaacgcgttttaaaatatatataatgtgttaggtaaaaagtgctataaggagagctaaaacacaatgagaggctagaagagtgatagtggcggaggggcttctctgaggagatgacatttgatcaggggtctgaataaagtaaagaggccagttatgtgaatatctggaagactcaaggggcagg

SEQ ID NO: 620 - DNA, 499 bp, Homo sapiens
  source 1..499: mol_type = other DNA
taactataaattgtgcattcttgcatagatcctccttgggaatgagaaattaggaaaatccagttgttaaaatgaatgcctaaaatcaaaataaaatttgtttttctggcacctgcttgatgacacagactaataaccaatgacaaaattgcccttgaacccaagttttcatttcctcctattgtgtggtcaggttatgtaagggtttgctttcaccccattcaaaaggtacctcttcctcttctcttgctccctctcgccctcattcttgtgcctatgcagacatttgagtagaggcgaatcactttcacttctgctggggaaattgcaacacgcttctttaaatggcagagagaaggagaaaacttagatcttctgataccaaatcactggaccttagaaggtcagaaatctttcaagccctgcaggaccgtaaaatgcgcatgtgtccaacggaagcactggggcatgagtggggaaggaatagaaacagaaagag

SEQ ID NO: 621 - DNA, 499 bp, Homo sapiens
  source 1..499: mol_type = other DNA
gtagtgctaaaaagtgacgacctcacgcgcgccctcctgcaccgctgggcccggagtggtcaggatgggcgcgtcgggaggtcagggctatggttccctgtcagcagtccccaaggtctccgcctgcctccgcgcacgctcccatcctcctggggccggactccgggcgggtgagccgccccagctgagcacccgggcctgcacttcccagccgggctgcttctggggtgcaaagcgtcgcttgctaaaagcgaggtaaacgcaagccgttatcactcgtgtggacttaacactctgcttcttggagaacacgtatgctataaagtgaaatggccgggtacagagtaacggctaagaagcacgctgcacctccctggggtcccgggaacccgcacgaatctgtgcatagggaacaaaaccgaaacacggtggtggccttgaagtggtagaattatgagtgattttcccgactttatgtattttcttaaatggtcgtgtt

SEQ ID NO: 622 - DNA, 499 bp, Homo sapiens
  source 1..499: mol_type = other DNA
ggccccgcccccgcatctgagccccgactcctaaccgcctagagctcccgccccgcccacgcaccgacccccccggccccacccccgagcccccgcagccccagaggaggccacgggctagcgatggcgaatgcggcgtggctacgctctcagcctggccccgccccaaccctggccccgcccatgccccaggctcctgcctgggctctgctctcggccccgccccgcacccaagccccggccccacccccgagcccccgcagcccgggagcctaggccccgcccccgagtcccggctccacccccgagacccggccccacccccgagcccccgcagaccgagctaggccccgcccccgagacccggccccacccccgagcccccgcagccctagagccgcccaagggatggcgatggcgtacttggcttggagactggcgcggcgttcgtgtccgaggtaagcttggagtcccggccgttcggcccatggtcgcccgc

SEQ ID NO: 623 - DNA, 499 bp, Homo sapiens
  source 1..499: mol_type = other DNA
tgttctttgtgcttcttgtatttggatgtctaggtctctagcaaggctggagaagttttcctcgattattcccccaaatatgttttccaaacttttagaattctcttcttcctcaggaacacgtattattcttaggtttggttgtttaacataatcccagacttcttggaagctttgttcatattttcttatgcttttttctttgtctttgttgattgggttaatttgaaaaccttgtctttgagctttgacgttctttcttctgcttgttcaattctattgctgaggctttccagaacattttgcatttctataagtgcacccattgtttcctggagttttgattgttttttatttatgctatctatttcattgaaaacttctccccttatttcttgtatctttttttttttttttgtgacttccttaaattgggcttcgcctttctttgttgcctccctgattagcttaataaataactatctgaattctttttcag

SEQ ID NO: 624 - DNA, 499 bp, Homo sapiens
  source 1..499: mol_type = other DNA
tgagctcatgtgatttttggggggtgttaaagaatcttgttttttcatattatcagagttggctttctggtttcttcttattggggtaggctctgtcagagggaaggtctagggctgaaggctgttgttcagattcttttgtcccacgggatgttcccttgatgtagtagctcccccttttcctagggatgtggcttcctgagagccgagctgtagtgattgttatctgtcttctggatctagccacccagcaagtctaccaggctccaggctgctactgagggttgtccgcacagagtcctgtgatgtgaaccatctgtgggtctctcagccgtagataccagcacagtatttggggtgtctcccaggtcctgcaggagcaatctgcttccttcacaggatctgtatgctctcccagttttcctgatttattcctgcagtcgttctggagcaaaagttcacaatgcaagcctccacatgctgttttgtccatccgagt

SEQ ID NO: 625 - DNA, 499 bp, Homo sapiens
  source 1..499: mol_type = other DNA
caatccaccgtgccccagcacctgcatcatacctgttctaaagcatttaccaagttgtattgcaatggtttgtctacacagctagttttccctctaacgacttcttcaagatcaggggctatgtcttattcgtttttttatgtccccggggattagctagttcttgggaaacaactgggacttgggattcaaaacagtttgctaagtgaatgaatgagaggcccagtcaagctacttcccttcagtgctgcacagtgcaacaaataaccagctcagatacaggttcaaagaccacaggcttctccctggacagctcagctctcctcataactcctgagaaaccctggacatgccagggtgtactatggagtggttgcatccggaagagggggaggaagtcccaaacactaagtaatccaggtttgggttggaaaacaaggttgaagttactcattagcaggtgaaagggtcaagggtcgaacgcaagggagctgaaagc

SEQ ID NO: 626 - DNA, 499 bp, Homo sapiens
  source 1..499: mol_type = other DNA
tatggactgagattgggggaagcctatggtggaggctctgagggacttgggtggatggcctaggatgactggagaccatcttgggaaaggaagagaggaagggggtgtgagtgttgtgataatgaaagcaagaagaaaaatatcagtactgtggccatcaatgcagaggcatggcagaattggggggtggggtggttacccaggttgactggggaggggcaaagaggaaaagtcatttaatgactctttgtcatggatccaatccccagttggaaagaggaaggcagccaacacctctacccctaaatcttgctgttttgactgatgaagaggttgaacccatcctgtgctggaacccaccctcttttgctcccttcattgtctctccagttcccagaggtccacttgggccagtggtactttatcgcaggggcagctcccaccaaggaggagttggcaacttttgaccctgtggacaacattgtcttcaatatggctg

SEQ ID NO: 627 - DNA, 499 bp, Homo sapiens
  source 1..499: mol_type = other DNA
gtagggaccccatggagtacgtgacgcctggccctccagctgcatgctccagttatcaggacagagacccctccccacccattcccaggcttccctggctccctgctctgctgctgggaggccctgtcaccacacatgcgcgtgcacgcactaacatacacacacccctctcaggcacccccggaagaccagctgcagctgggggtgggggtgcacggagcacagccagggttctcagatccctagcctgctctcccaccccgccctagcccccaactgccgagctgcttctagttttaaagcaaaacatgactctgtccttcctgctgctcagtggcagcaacactgcctggggttatttttagcagggatgcagggaaggcacagttctccttgactttaactagggacaacccccacccctcagccaagactcactggaggaggccgggtacggaaacccccctcccagaaaggggaaatggtgtgttttctgttc

SEQ ID NO: 628 - DNA, 499 bp, Homo sapiens
  source 1..499: mol_type = other DNA
ggacagtcatcttggacatgctctgtgttccatatcatgacttcaagccttgcctttttcatgtactaccagtgggatcctagactagcactttaccactttaagcctcagtttcctaatttgtaaataaggagtaattgtaatcattccaatatcacaggcttgctgggaggattaaatgagatcatccacatcagggtcagcacagtgcccggaatggggtacctgtgaaattaatggtgattcttctttattgttaccttggaaaatggaggccaactgcaggatgatcgtggctccaaggagctggggacccaagacatgcacagagaaagagagaccaacaatgtgaggcctctgatgcatgagacaggcaggggagtagtgggaggagagagcaagagtgagcagccaggagggcctcttcccttccctttactcagcctgtcactcctctgctaggatcctgcattgacacatcttgtacttcctgtttcca

SEQ ID NO: 629 - DNA, 499 bp, Homo sapiens
  source 1..499: mol_type = other DNA
aggtgtgtcttaggccagggcatcagctcccagcaggggagagggatgcgaggaggcctcatggctcagcagaaagaaacctggttaggatccagctttcagtcctgaatcctgggctgtcggccaggccatggctgtagctgcaaataggcaaggctgacctaaggtctcacaggacaaagggcaccctgggagagctggccccaggccccaggggcctcctcttcttagggatcctgggagctctgctgaccaaggggctaggggctcacctcctatgccatcacccagctacctcatcatggtagccttggtccctgaacactaatgggtaagccccagagccacgagccagtgacctctgaatggatggcttccccttcccccaggcaccaggcaagacaggtagaggtccctggagacctgatggctggggagggcccagtcctgggccagcccctgagggctggattctggctgcaggctctccagtccatcc

SEQ ID NO: 630 - DNA, 499 bp, Homo sapiens
  source 1..499: mol_type = other DNA
tacttaagcccagaagttgagagacatgtgagagggatgggcctgccattgccttgggtggttactgtgtaggcattagatgtattactttacctcttaaagtctcagtttaccaatctgtagatgggggctatgaatataaggcacttttagttcatggcttgtagtaacaggatcctacacaagaactgttatcatcatcattaattgggaggtgattaaggcagggaagggctaaagtggcttcagggagttgagacaaagagctgagaaggcaatttctgcagcaagaggtggagaaacaatagaggccttcttttctcccttcctcttttccagtcccaggtcggtatttacataatccatctggaggtggaatgtcggtggaggcagtctccctgggaggcagcaggtcgaggccttccttgggaagaagctgaggctgcaggactggggagggacaaagtttcctattccccaagctggcgtgaatcgttgg

SEQ ID NO: 631 - DNA, 499 bp, Homo sapiens
  source 1..499: mol_type = other DNA
tcactacagatgctcctgtattgttgcttacaatttatatactaaggataaagttactgatattttgaaataactgtgtgttttctagttctttatttggacacagtgtttgcatgtatttatacctctaaatgttctctatgagcatgaccaactgattattgagattggcaggtgctagcgcccttcaatcagcttctcattgctgcacaatctggcttttctcttcttttcacagaatatataattggaatacatgcatgaaaagaaaagagggaaaacacatatcagtggctttttttctttttctttttctttttttcacttctactgattccatttcagcagttagtatgacctctcataatgttccaaatctaaaaattgtcaaaacagaaatctactcttcggagctgacacaattcctcaattttggaatgactctgctttacctctttttagaatttcttctttctgcgtgagtgtgtgtgtgttgttt

SEQ ID NO: 632 - DNA, 499 bp, Homo sapiens
  source 1..499: mol_type = other DNA
taaaaggaagtctttgcttaatgctttcagtaacttttaaaagcagtgtacggtgctggtggtatttgctgcaaggatgtgagggagagctgcccagtgaagataaatttgtatgtatattgaaatgaaatgctatcttcacttagagaaaagggtgagctgataaagacaaaactgctcattgggcaaagaaaatgctcaggattgcccttggcacagtgataatgtaagataccctgtaatgccttaacaggaggctagaggccatctgcgagtgtgggtgtcaacatctgaaggaagagaacttttagggaaatataagaaaggaaggcattacagcccaaaactgagcaaaggagctgttagcctgcgtggcatgcgggaaaacagtttctcaaattattaggctatccggtgagaagatgacgttcttagagattttgagcatttcaaagtgtatttagaaaaagattttaatccttttatctcatatttctat

SEQ ID NO: 633 - DNA, 499 bp, Homo sapiens
  source 1..499: mol_type = other DNA
taggagcagcgtgcctatggaaaatagaaaataggttctttttgtttttgttcttgttttttgcttcagaaataattatagaaatctgtgtttagaagcagtcctaagaagttacatgcaaagaagtaccagtcttggaatgagagtgaatcatacacatacactcccagttaatatcctaggtggtttggggcaaataactgggctttcacattcggtctaaaaatgtgataagacattcttctttgctcacataatgatattgtaatatataaataagaagaaacattaaccaaaatttgggtgacggaaaagattttgaaaaaagtgaagtgataggtacagctgaaattctgtcttacctatcagatcttcaactaatatgagtgctacacccatgtttaacgaatttaaccttggaagtgaaagaagttctgctctgcatattaaattttttgttaaagttacagcatgttttgggattttttttttctcctag

SEQ ID NO: 634 - DNA, 499 bp, Homo sapiens
  source 1..499: mol_type = other DNA
taagtatatctctgtgataactttgaatatggtcatattaagaataccttcctttaggccgggcacagtggctcatgcctgtaatcgcagcactttgggaggccaaagtgggtggatcacctgaggtcaggagttcgagaccagcctggccaacatggtgaaaccctaaaaatacatatacgatactatactatatctatactaaaaatacaaaaattagcctggcttggtggcagctgcctgtaatcccagctgctctggaggctgaggtacaagaatcgcttgaacccaggaggcggaggttacagtgagctaagatcatgccactgtactccagcctgggcaactgagtgagacttggtctaaaaaaaaaaaaaaaaaaaaaagaataccttcctttaaatcattatatcgctaaactaaagggaatcacagttaatttttttatgattaaatctccaatgcagagcttttgtacacaaatggattttatgggact

SEQ ID NO: 635 - DNA, 499 bp, Homo sapiens
  source 1..499: mol_type = other DNA
gtaaagaaacaacttgtgaaaaattcactagtaaacatcaacttgatttacctgggaaaactttgttgatgatcattgcatagatccatgatcaattcttaagtttcagtatagcttatttttcatctactatgggtatatttactgggagagcaaatatgaattatgaagtcacagaagtcagagctagaaagtagcttagaaatcatcacattcagtgtgaacatctctggtctctgactcctcaccagtgaacagaaaaatatttccctgtgtaggtctgtgatttgaaaactatatgagtaaatggcaaaagagagtcacatcagtttaagattaatagttttcctttctcattgctaagatagctgatgaggttaatgtagtaaagtccttaaagtgtaagctgattgtaatctaagaggtgatatggcaggattttaagtggtttaagtcaggtctcggctacagagatattaagtgtggtgaaagcagcact

SEQ ID NO: 636 - DNA, 499 bp, Homo sapiens
  source 1..499: mol_type = other DNA
catctctactaaaaatacaaaaattagccaggcgtggtggcagatgcctgtgatcctagctacttatgaggctgaggcgggagaatcgcttgaacccgggaggtggagattgtggtaagccgagatctagccattgcactccagcctgggcagcagagcgaaactccatctgaaaaaaaaaaaaaagagagaaaaaaaaatgcttgactagaagcccaaacctcaccattatgtaacatatccatgcaacaaacctgcatttgtaccctttgaatctaaaattagaaataaagaaaagaaaagaaaaagaaaaagaagtgacagtgcactgaaaaaaaaggaaattaaaatgctttggaaaagaaaataaattataaaaatatagaaaacaaaataagatttaaggggtgtgggggaagcccaaatagttgttactcagccactcagctcctcagctcctcttgcaggcccccctttggattaagttgcatttttaaca

SEQ ID NO: 637 - DNA, 499 bp, Homo sapiens
  source 1..499: mol_type = other DNA
gttcgtacttaccgtactatattttgcagatgcctcaaaggatttggggttacttggcatggggaaggcacataaggtggggtgtaggagagggtctctggttgtaggtttcttaatttaatgtttgaaaacaaacatgcaaaagtctgtgtgcaggttgatgtttctgggcagcctgagcaaaatttgctctctcaagagggaaaggaaccaggtgggagcagagctaggctgggctaggctagttgaatggtgggacatgacatacgggtggcactggcaataacaaagtcacattctatgaagattccctgcaagaggaagcagacatgggccagttactgtgatttgaaattgcctaaacattgctttaggttggcatgtcaatttcaggtactagtgttttttttgtttttgtttttgttttgtttttgtttgtttgtttgttttgagacggagtctcgctctgttgccaggctggagtgcagtggcgtgatct

SEQ ID NO: 638 - DNA, 499 bp, Homo sapiens
  source 1..499: mol_type = other DNA
agtaggttgctgggacagaacagggggcgcctgctccacccatcacgtatccggttggaagaaaagccagtctcaacaacttgattctctcggttaaatgataagtttagccgaccatccgtctccaagtgctgaacattagggtaggggaggaaggagcacatcagacgttccctttcttttccaaccacaaatcatacggttgcatctattctctattccgcgtagaaccctccgacctgaatgccacgttcctcccggaatgcatgccacagagcctctgagaaaataaatcctgtgcatgtgttttgaattttttccggactgatttgtgaggataatcagttaagttacatttcttgtgtgcgtgctgggggtgtaataaagctaggacactgatgactgtaattttctgagtgatgtcgcaatggggagaataaatggcccagtgttgaactttgcagcttgctcccttcctgtacttaaattgccttgatat

SEQ ID NO: 639 - DNA, 499 bp, Homo sapiens
  source 1..499: mol_type = other DNA
atatccccagagtgggtgttgactgctgcccactgcttggagaagtatgtttaggggacaattgacatgaagtcttgtcttaaatactttttctgtccttcttttcctcctttcctcctttcctttctcactcttcctcccttccttctctggctgtgacactagggaccaggccagggcaattggataagagagaagggaagggtttctagaaagaaactgcagaggaaagacacagtacagatgattttgtgggcctgaataaactgcagaacagagctgttcactaccataggctgtatcagtctctgcccaaacagcccaagaacattccttaactgcctgtttcaagcaaatcatgaattttgcttcttgccactcagaagtcactaattctgagtggccaagggtgtcagggagacagcaccaatttcatggcacagaggttacctgaaggggctggaccatattttcctcttgacgtcctcatcttttctag

SEQ ID NO: 640 - DNA, 499 bp, Homo sapiens
  source 1..499: mol_type = other DNA
tactcgttcacctgtggtcttcaccccacgctggtgaagatatttgctttatgtctgggttttatgggccatggccactgcatggcagtggggaggaactgtctatcacatgaaaggctcaagggctttggggacagcatcaatcttcaaccctagccctgccacatgctagctgtgctcttgagaaaggcagcaggactccgttttctcatgtggaaaaagagttgaaatgaggtactctgttactcctagaactcacttaatgttcaccagttcatacacattcatgatcagagaacgattcagttattccaggctgacaattcccccttcatcataatatgtttaagagaatcatataagactatatttgtttcaaagcactttaaaaaccacaagatcgagttgggtgtctggtgtgggtgcctgtaatcccagctacttgggaggctgaggcaggagggtcacttgagtcccggagtttgaggctgcagtgagt

SEQ ID NO: 641 - DNA, 499 bp, Homo sapiens
  source 1..499: mol_type = other DNA
ggtctcgaatcctgaccttgtgatccgcctgcctcggcctcccaaagtgctgggattacaggcgtgagccaccttgcccggctgatagtggttattttgaagtaatggaatattttattctaaattttctaaaatgattatatattttataaagtaaagcattcaaaagaaaaaagctgcacaaattacatttttagcacattaggaatgaaaaactggaaaatactcaaaagggaactagttaaacagaagattagaaaatttaaatacttatgaatttttttacagcatgggaacccatttgtgttatatttaaaaagcagaacataactatgtagattaaatgttgattatacaaaatacacatgcataaagttcaaagattctaagatactagaaattaaaagttgattagaaaggtaacattttcaaatttacttgaatgttaaaactaatttatacaatttttgggataaggtgtctgtctgatttatcaata

SEQ ID NO: 642 - DNA, 499 bp, Homo sapiens
  source 1..499: mol_type = other DNA
gtacgcaagtatttctcacttttatcatggtgtacaaagagtggaaacaactctgttgtagcaaaacccttttgaaatgcactagttcaaatcagttctcaccagcttcaacaccatctagcttaattctatactcagcatttaaagttatgcccccctgcatatgtaccctttaatgtataataaaagctaaaattaaaacaaagttatgcccgttactttacccatcctctttccctggcacatggttggtgacaggggagggacaaatgagcccagtactgccaagaaggggaatttcacttaatacaatgtgtaacatatgttcctactctgattaaattctaggcattaggccgatggtcacattcatatttatggggctttctacaaggcatagcatttcatgattagcatgaacccttgtgtagtactcaaagccactgcttaggacaaatggagcatcacagatgagctccttggctgacatgctgctttg

SEQ ID NO: 643 - DNA, 499 bp, Homo sapiens
  source 1..499: mol_type = other DNA
tgaggacactgcaatttggagagggtgggtaacttgtgtagggtaacacaactagtaatgtatagaatctggacttgataccagtcttacttcacagctcatgatcatgacctccattctgtgtctcttttcttctgactgtccactgttggctcttgcgttgtgacaggcctggagcaaaccctgtagcactttaccttcactgatggatgggggtctgtaagtgtgagtggtggggccagttagctgggctggggaggctgagctggggcactgcccacacaaacagaggatgctttgttagtttctggtgcacattttcagtctttctattttgggttcagtgcttcagaattgacctcagaaaggctagttgtgtgtctggatgcagcctgaatgccagctgccctgaaatgcttatctgagttgtggaggcctagctgtggggcccttgagggaaggaatggagcaatggttaatggactgtcttcaccctcca

SEQ ID NO: 644 - DNA, 499 bp, Homo sapiens
  source 1..499: mol_type = other DNA
atctgacttgtaaaataagtttctggtttgtcatcataaaacataggtatgtctgtctcattctagatcaatttagaagacccaatttggggtttattacggcatttgaaatttgagagttagaagtgacacctgtcttgatgaagtattgaaacaacaggctagctctccctaagttattagaaacatccagaaaaagaacaaaattcaaggtaagtacaggtgtagaaatatagaagccacagacatagggaaatggtcttatggtcctgaatgggttgggtagacaggaaagtttgggaataattttcccaagtacaaaagaaaaataaattgttcaatagcctcatctctcttggtaattttctaaatcattctattgtggaatcaaagttttttaaatgaatgaatttccagctttatcatccaacatcaagagaaaatgaaattgccctaccgagctaactctgaaagcacatatcggttccataaagcaaga

SEQ ID NO: 645 - DNA, 499 bp, Homo sapiens
  source 1..499: mol_type = other DNA
aaactctgtgttgaaaaagtcatctattttaaaatttttattataattacactagggcttggttgtcagtcggttttatattgagaaatgttttttaggctgaaaataaggtacaactttagcaacataagaaacattttgttcatggacgaggccatatttcaaacttctaccaccctcacaagattactttttaatattgttgttcttctccttgtttaccaatatgcatgcacattacagttctatccaagtaaaccatcaaataattattagaaaattaatagattatggaagtgttgcattcaagaaaaaaagtgatagctcctatgtcatttgtcttagaggaatgcaaaaaaaaaaaaagaaaaagtcataaatttgtggagacctgttatcagggcttcatagtaggcacagggaagagtgtagaaggagattcacattcaggaaataactgttgtttgcatttcttctttctttatttaccttctggtag

SEQ ID NO: 646 - DNA, 499 bp, Homo sapiens
  source 1..499: mol_type = other DNA
taaataatatataaaataaccctaagaggtaaatcttctttttgtgtttatgatatagaatatgttgactttaccccataaaaaataacaaatgtttttcaacagcaaagatcttatacttgttccaattaataatgtgctctcctgttgttttccctattgcttctaattaggacaagtgtttcctagacataaataaaaggcattaaaatattctttgttttttttttttgtttgtttgttttttgtttgtttgtttgtttttttgagatgaagtctcgctctgttgcccatgctggagtacagtggcacgatctcggctcactgcaacctgcgcctcctgggttcaggcgattctcttgcctcagcctcctgagtagctgggattacaggcacccatcaccatgtccagctaatttttgtatttttagtagagacagggttttcccatgttggccaggctggtctcgatctcctgacctcaaatgatccgcccacc

SEQ ID NO: 647 - DNA, 499 bp, Homo sapiens
  source 1..499: mol_type = other DNA
gtaacaatatttactatttattaaaaccaaaaccaaacttaaaacaaaaacagaaaaacatgccaataaatgaattattttttctcattcaaacaaagcatagtcatgaataatgttcttactctgggttttaaacttaccctctatgttaattgaactttatagtaaaaccacttaaatacttgagaatgctaaaatatttaagatttgtaaagcatctaattttgtaaaatactaacattcacattatccctataattaccataataataatatccagccctgatcattatagcttttccattttaaacgattttcaagactcgggcatttacaggaacagatttttctaacccaaggcatctgtaagctataggtccagtgacagaaagtcaccatggtcagctttctgccggtcccattatcttcaatgcctcctgtccgctggttcctctgttctgtgttcaaaatgctcctctgcatgttggtccctttcaac

SEQ ID NO: 648 - DNA, 499 bp, Homo sapiens
  source 1..499: mol_type = other DNA
tcttatatgggaacacaatatataaaacaacagctttattgttttgattgaaggctaagaaaggagtagttcctctggcccaccaaaactctgtctttgagatgcttccaaggacctaccagggaacagtttaaaagccataagcaatattctctctgtattccttgcttatatcattgaagactattattaattgcctttttggtctgctcttccatttttgatctttctcatgggctggaagctgtagtgtcgtgcacatatgactttgctgcaggggatgaaagggtttgtgtggggtggcctagtggagcatgtggcttccagaagacttctcctggggacccattacagaagctaactaagaggcttcctatgtggccatctggctagccctgtggtttggagcagtcaacatgaacccatgggccatgcagcgcctctattagcatttgaagtactggtattgtgcttgatttttctcctccatggtttataa

SEQ ID NO: 649 - DNA, 499 bp, Homo sapiens
  source 1..499: mol_type = other DNA
gtgagtgcgcgcgcgggcggggggcgcgcggggagggggacgcggctcggggcgctcaccagccccgctccccagggctcaccccaacaccctgcactgggtcgatgaggccgggaaggtcggagagcagctgccgctggaggaccctgacgtctactgcccctacagcgccatcggcaacgtcacggtgagcaccccctgcccgctcctaggatggggcgcggcacgagccctttcctgggtctcgaaggagggacgcggggagcgcgcctcaccgtcctcgtgtccccagggagagctggtgtacgcccactacgggcggcccgaagacctgcaggacctgcgggccaggggcgtggatccagtgggccgcctgctgctggtgcgcgtgggggtgatcagcttcgcccagaaggtaagtgtccctggacagagggagggcttgagcccgggaaccggagggtcggactgccagtgagaatcgttcagggtgctgtga

SEQ ID NO: 650 - DNA, 499 bp, Homo sapiens
  source 1..499: mol_type = other DNA
agtctccggcgccgccctggtggtgatgggagaaaatgggtccgcggagggccctgcactgcggctcgcgcctgtaatgccagcactttgggaggccgaggcgggcagatcacctgagatcaggagtttgagaccaacctggtcaacatggtgaaacccgtctctactaaaaatacaaaaattagccgggcgtgatggcacgtgcctgtaatccctgatacgagggaggccgaggcaggaaaatggcttgaaccaggaaggcggaagttgcagagagccgagattggtccactgcactccagcctgggcgacagagcgacactccgtctcaaaaaaaaaaaaaaaaaaaaaaaaaaaagcgtccgcggggagcgctcttttcctaaactcaggaacccctcgccgcccctgcccctggcgaccccacgtctctggcatccttccctcttccctccctctcctccgggcgcccagaaaagtccccacctctccccgctta

SEQ ID NO: 651 - DNA, 499 bp, Homo sapiens
  source 1..499: mol_type = other DNA
atctcggctcactgcaacctccgcctcctgggttcaagcgattctcctgcctcagcctcctgagtagctgggatttcaggcacgcgccaccacgcccagctaattttttgtatttagtagagatggggtttcaccatgttagtcaggccggtctcgaactcctgacctcaggtgatccaccttcctcagcctcccaaagtgctgggattataggcttgcgccaccgcacctggcctacttgtatggtttttaggcttccattgctgtttgcatccgtctctccatggaaaaggtgtttctcttggatagcaattttgatagtttccctaggcttctccgcagcatctggtgagagatggactcagcaaatgtttactgatgggttggtggatctcagtctgccccatcacacctgaattcagaacagggccgccccaggcagcaggagtgtccccaccctcagtaatagaggccctcgtctgttcttgttcctccacag

SEQ ID NO: 652 - DNA, 499 bp, Homo sapiens
  source 1..499: mol_type = other DNA
tgcagtagaacagaaacttgcgcgtcctctttccctggggcggcacagctgagccaatcccctcctcccctaccctgggctccaaggcacccaatgactgccacctgagaaatgaacctgtccctcgtatcaaagccacaaacgacttctaactctggatctcagggcccacctctcactcctctggcctctgcaggtgctgtcagatgcaaggttcttccaatttccctcctcctggggacttgacagtctcccctcccttgttaagccccatacataaggcatcaagggaaagcagcagctatcgactgccgtccatgcctttggtgctaagtacttgctctattctaaggagaaatcctggcagtactcaggtctgggcaccaagagcttatccatctggaatgagatggaaggaaaagaggttaccaagtgatatgtagaattggcctaaaaagcgagtgttctttaattttgagcaggccatcgtttctagcat

SEQ ID NO: 653 - DNA, 499 bp, Homo sapiens
  source 1..499: mol_type = other DNA
ccttaggagtcgcccagcagcgagacagctgtggatcccctccaggcgcatgggaggctcacaaggcaaggactctgatggttttggcttccacctcctgtacggtggccagtgctgtgagggtggttggtcccacagggaaacctgtgaacagagtcatgtctggggccccagggacatggcttcaacccctcacctggcagtcctgcctcccaaaagtaaggcaggagtccggagattcccattgcttgcttctgtgaatctcaggtcactttagcacttgacccctgaccccagactgccttgtccttgaggcctgggattcctaaggtatatactgtctgctccagagctgtggctgtggctatccggaaaacgacagctttgaaggactgcagagcttgcctttggggctgttctgcccaaggccttccattgttttcagacataaatgaaattgttaatcctctgacatttaccttttcctctcaacctgcag

SEQ ID NO: 654 - DNA, 499 bp, Homo sapiens
  source 1..499: mol_type = other DNA
tgaggctttctaggagcacctggcttagctctcacaggaggaggggcggacggggaggccaggcctcatgctcacagcgccagcctcctgtgagagtgggctgggtctcctttcctttcccaggcccttcctggaggcgatttctttctttctttctttctttccttttcttttcttttcttttcttctctctctctctctctctctctcccctctctcctctctctctctctctctctcttttctttcttttctttcttttctttcttcttttttttttctgaggcagagtctcgctctgtcgcccaggctggagtgcagtggtgtgatctcggctcactgcaagctccgcctcccgggttcatgccattctcctgcctcagcctcccaagtagctgggactacaggcgcctgtcaccacgcctggctcattttttgtatttttagtagagacggggtttcactgtgttagccaggatggtctcgatctcatgacctt

SEQ ID NO: 655 - DNA, 499 bp, Homo sapiens
  source 1..499: mol_type = other DNA
gtaagtctaagttcttgtattccttggcttcattgtggagaaaatgcactaacttgcacagaaataatgctttggcattaatcagccgcttctccttagatgacttctttagctgtgctcaggtattttgatcctgtacacaagataaaggttttgatgtgcaaatattcctttgtttttcttggcatagaggatgtagaagttgtgttgcattctctgacaatggatctgtatataaaaccaatatgaatttaccacttcagtgcctggcaaatgcccgagttcacatggaagaaaggtaaagcgtgatgaaggaaataaaaggcttagtttgaaaagggttgaattgaaaactcaaaataattacagcctttttaaagctttcagatagaaaaattccagcacaaaggatgtcactttcagttagccaaattttccagttgagttcatcttcagcctatcattcctagtagattccagctttttgtttccaatttcc

SEQ ID NO: 656 - DNA, 499 bp, Homo sapiens
  source 1..499: mol_type = other DNA
gcaccactgcactccagcctgggcaacgagagtgaaattccatctcaaaaaaaaaaaaaaaaagtgttgtcacctattctcactctataatattctatctaatgtctacatgattatctcataaatcttaggtctgtaataaataagtcagatcataaatgtggtattgtcaaactttaaaggagaatcgaaaataccattaccaaaatttagctgtcacctataacaatttttgtgattctaggatgaatgggaagaattagtgtggatgctaagtagtggggtttctgaaaagtcatcttcaggcttccatatgttaccccatcatctccatcattggcattatgactgtttaatacttaccagcatcctcagatgctctacaatataagaaattaggtgcagttctgtttgtttaagagatgcaagtcttgtcattttatcgataggatactttttagtatttgatcattagaatgattctttgaattgctttaca

SEQ ID NO: 657 - DNA, 499 bp, Homo sapiens
  source 1..499: mol_type = other DNA
tattgggatgggtgagaggaggaagatgctttttgggagtcagatctgtttaattttgagcaagtgtcttagtttttttgtcttagttgtctttaatgtaagtcctagaactcggagccatggccctcaacacagggttactgtgagcataaagtaaggtgataatagatgtgaaagaactttgggagccgtgagctctgtgggattatgtgctaggatggtgacatctcttgtgctttcctggggacagtgggcagcctcagacctcagaaggacagcacctgcttggtccaaagggtatgagattcaggactgtttgtctaagctgtctgtggtcaaaagtacattctggactgaagagatggtgatgtaactgggctgtgtgtgtattgaaaaatccctctttgctctttcctcatttcaggtttgtcctttgagtcaagttaaatatttattgagcatttctgagtacaaaagtggtgtattggagagttgggag

SEQ ID NO: 658 - DNA, 499 bp, Homo sapiens
  source 1..499: mol_type = other DNA
taagttcaagtggagctaacacttgggtgccggctggagggtttcaggagagagattgggacctcgggctgggagaatggggcaaagcagctcaggttgaggaatttggtcagtttggatgggtggaaggagttgatggtgcagagctgaagatggacacaactgagcaggctgggggctctaacaacaagatatgggaggaccaggagccaccgagagactgtcaccagcatgaggaagattggtcttttagtatgaagttcaggatgggtcaaaaaagggagctagataccagatcaggtcatgtatcgtctctgagcactttgtttctgcagttcagatgaaaattaaatatgttattgtcagcagttcttgaacattgggctggattgggcagattatatacctcgttctacctgttggacttgtcacgtggggtttgtatcagggtagtgggaaggtcacatgttatttctccatttttttagttccaaatata

SEQ ID NO: 659 - DNA, 499 bp, Homo sapiens
  source 1..499: mol_type = other DNA
gtagcggggagcaaggagggtgcgcgttgaaggcgacgggcatatgcgcggtttgaggtctgcgggtcagggtccgggcactgaagtgcacgtggtggccggcgcgcgtgtttaatcatcctggttctcccagcttgaagaatgtttgagctgccgggcgcgttggctcacacctgtaatcccacccagcactttgtgaagccgaggcgggcggatcatttggggtcaggagttcgtggtggcgggcgcctgtaatcccagctcctcgggaggctaaggtgggaggattgcttgaatccaggaggcggaggttgcagtgagccgagatcgcgacactgcactccagcttgagtgacagagcaagactccatctcaaaaaaaagaatgtttgagctgaaagagctcaagtaattatccctagaggaactccctcgtttttgcagacagagaaacagagaaacagaaccatagttctagaaggaagaaacagccttcttgg

SEQ ID NO: 660 - DNA, 499 bp, Homo sapiens
  source 1..499: mol_type = other DNA
aggctggagcgcagtggcgcgatctcggctaactgcaacatccccctcctgggttcaagcgattttcctgcctcagcctcccgagtagctgggattgtaagcacgcgccaccgagccgggctgatttttgtatgacagatgttattaaagacagcgtggagaaaccagagcctgcgttgctgagcttgcggccgcccgcttcacaccgcacttcagatcagctgggtcaggacgtggattgtcccgtgcaggcatccatcgtcgagtgtggcaacgagagggcgggaacaggaagtgaggataggccgagttccgggcgcgaggcggccaccgtggagagcagagcgcggcggctggaagctgctaagtcagagccgcgatgttccggattgagggcctcgcgccgaagctggacccggaggagatgaaacggaagatgcgcgaggatgtgatctcctccatacggaactttctcatctacgtggccctcctgcgagtc

SEQ ID NO: 661 - DNA, 499 bp, Homo sapiens
  source 1..499: mol_type = other DNA
gtaactaaccatcccagtcacaaaatgccgtgaactctggtgtcatgggattttgcgggctgccggtgcctcttctcctgaggcattggggcctcatgatcaagagcaaatgtctttgaggtaggggctgggtcacttgcttctcgtatgggttacctctcatcttgggagttaatgatgcccggtcccctctgcgttagattcccatttctcaagtgagatggaaagttagcctttgaaacaaggctttgaagctaagacacgcccccctaattgtctctgtgacctcttaccaagttatcttaccttcctgacgctcatctacctcacctgaaaatggaaaaatacctgtcacctgtgaaatagggccggaacaacctacctattgccattaaaggatgtcccgtctgtaaaatgtccgacacgtggggctttcgtcagcagattccccttccccaggagccaaagtcctccagccagttggcaggaagtgctccta

SEQ ID NO: 662 - DNA, 499 bp, Homo sapiens
  source 1..499: mol_type = other DNA
ctgaggtccaaataaataatgaggaaaaagtaaataaaagtgatgcatgaatactaaaaatttggaattacatatataatatgtaataataaaaaaagaaaaaattgtcactggttatccttcaggtataaaaattacaattaaaattgtaatgttataaccttccattctttcccctatgaattaaaacttttttttttaacgagactaaaaaatcaagttgataaaatctatgccctgtgggaactggttaggtcaggttacccactccagatttccagcaggctagcctcagctctacctacagccagtagcttattaaggctctaggcgccagtgacaccttcagacaggtggttagtgcgccctaagggctctccgcagcgtcgctcaggttcacagaacacgcccaggggcgtgtccagctgtcgtcggggagagcccacctccccggggggtgtggctaagggacgaggcagttctcgtccagagcccaggt

SEQ ID NO: 663 - DNA, 499 bp, Homo sapiens
  source 1..499: mol_type = other DNA
agaaaagcaagacagactgagaaagtgtggcttagccgcggtatggaggatggatggtagcacagataggctgcagggcccctaatttgagttcctgcacaaaaacgaccataatatcaacattgtaccaaagccaagtgatctcagggagaaaaataaaagatgccttccctggcgagcacatcaaggtttcagtcgcttggctgtgtccttgggaattttcttgagtccccactcccaggagccacatcagaccccactgaccgtccaacacaaattcctctagatggaagggatggatgatgaccccgaagaccgcatgtcctacttaaccgccatgggcgcggactatctgagttgcgacagccgcctcatcagtgactttgaagacacggacggtgaaggaggcgcctacactgacaatgagctggatgagccagccgaggagccgctggtgtcgtccatcacccgctcctcggagccggtgcagcacgaggag

SEQ ID NO: 664 - DNA, 499 bp, Homo sapiens
  source 1..499: mol_type = other DNA
gcataaggaaacccagcccagagccacgagctcagatgaggagggctgctagcagcgatcaacttagggacaatagcccgcccccagcattcaagccagagccgcccaaggtacgtggctgggaagcccaggatgggaaggaagaggaagcagatgcctctgaagcctcctggacggccagggaggagcatgcacactgagatggtgtttaattacggttctgactcactgtgttctctattagagcctatcttttggcctgttgggtgaactcccaaattagggaagggcaaaaaggaaggaaaggcaatattaggagagcatatgattttaggactgttagtgtttatttaatttactcttcttgttaaaaaaagattgtaaagaaaaagattgaaaaatactgtactgtatacccagaatcaccaatcgcagaacgtgtttttcttttgctgtccagctaaagttttctgcccagtctgatttagatgcaccagat

SEQ ID NO: 665 - DNA, 499 bp, Homo sapiens
  source 1..499: mol_type = other DNA
gtaaggatattgcccactgagatgaatcatgccagtgtaagctagaaatgaaggcaagtaaagaaggaagcaaggaaaaacaaaacacaactattacactggtcttagagccacacgtacctggttttcaataccagctcctccatttaacaactgtgaccttgggccagtcactgaaatattgtgagcctcagttctcctatctcaaaatggggatttctcaaaatgttgtggggattaacttagacaatgtacataaggtgcttaccacagtaccttggacaaagaagattaaactctgcacccggaagtattatttttagaaaaaaattagcagcagtagagtggaaagtccccacactttgaggtcagacacacctgggtttgaatcctggttctatcacatgctacctagataattttgcaaggtacttctgcccaagtagacaagcattaactcacaacattgggttagctaagcagaatttgaatcccagct

SEQ ID NO: 666 - DNA, 499 bp, Homo sapiens
  source 1..499: mol_type = other DNA
acttctcaaaagtgaaaactagtatccattgaataagagtttttaccattccaagcattcatttaattctcataacctctggtagtagactcaattattacccttatttagagatgaagtgagaaaactgaactacgaagagtaacataacttgcccacacaacaaggcaaggtcagagccagtttaggctaattctcaagctcatgacttttgcctttgctatgtagagagtagaggttgtatccttaattctctttacctcctgtactaacacaacacctggtgcatgcaggtgctcaataaatgttagggtagacactctcacagtgtaccttctaggtaacttcccttctgctatggactgaactgggtccctcgcactaatacactttactaattcaactccttgatctgtaaaagatgcaaactgttagttagttcaagagttctgcttgtgttttcctgacatctgacacctgttaattatttgtatccaca

SEQ ID NO: 667 - DNA, 499 bp, Homo sapiens
  source 1..499: mol_type = other DNA
gtaagtagacctcctgctttctttccttcccttttctccctcctctaacccccttgctttcttcctgccaagtttctagacgccccagtggaggaggtttgctcttagacctcctccccttacgtcgaaatgaccgctgggtcttgcactcggaggatcttgggagccgacgtcccgacgcctcccgcccccgcagttccttggagagcttggagccgcgcgccggagggaataggaaagcttggttacaacccgggacacccggtagcttcctgcacccgggagggggctggccagggaacttgctggactgcacaactgggggagggtagaagaagaaagatcggggtggggattcgggaatgggcaagcgggcggcgggcggcgggaggcgagggtgggagcaaagggcgagcgggcaaaggccgggcgccgcgccaggccccctcctcgggcgggcgagactttcccgggacctggcccctctgcggccagaccc

SEQ ID NO: 668 - DNA, 499 bp, Homo sapiens
  source 1..499: mol_type = other DNA
gaagccaggtcaaggcctgatgtttgctagggtgtgatgggtggggtgcctcagtggcaagagtgctcactcctgcctgggggagtctggcaagggttcacagaggtgaccttgaattggctggtggaaggcgagtaggtgttcagcaggcggactggggacagacaggcagggtgtctgcaccgcagccctgggcgaaagcttgcactgcgggcaagcggcagggctgacggggagcccagggatcggagccagcaccgggggcttattagggctgcggccgccccaggccctgcctttggacccttccggcctgcttggcagatgccacggttggttcccccacggggcatatttccgccgggctccaacttaggaccccaggcggaggtccagtgtcagctggacaaagctctgttaggaattttcctatcaggagtccctaaccccctacacgcacacacacgggcgcgcgggcgcgcacgcacacacacgcaca

SEQ ID NO: 669 - DNA, 499 bp, Homo sapiens
  source 1..499: mol_type = other DNA
agcctcctacctctgctggaagcccagatcccattgtgtgccaacctagtaccggtgcccatcaccaacgccaccctggaccgggtgagtgcctgggctagccctgtcctgagcacatgggcagctgcctcccttctctgggcttccctttccctgctggctgtggtcggacccccactcccggctctgcctttttctcttctgggtccccagggtgaaattctcaccagcccaggggactctggaggcaccccctgcctccaaacacagaagcctcactgcagagtccttcacggaggacggttctgtgctgggcctggaggggctgcctggggggcaatgactgatcctcagggtgagctcctgcatgcgcactgcccaccaggggcctcatctccccatctgcaaaatcagggagagatctgcctgagtctcctcccagctgacagtcaaagattcagcatcaagcccccatcaccagctcccaccttctccccag

SEQ ID NO: 670 - DNA, 499 bp, Homo sapiens
  source 1..499: mol_type = other DNA
tgagagcccccattccaatgcacccccatctcagcttctggccagaagacctgagcaagtccctccttcttcctggccttggccttcccatgggtggaaccgggagggctggctttaatctccaccagactcttgccccaggactgtgatgggcgattggccacttctcaataatcttcctgttttccttccgccttctgtttggctttagacaggaccagtgcatctataacaccacctacctgaatgtccagcgggaaaatgggaccatctccagatacggtgagggccagccctcaggcaggagggttcactgtgggaacagggcaggccagcataaggtgggggctggatgtagagccctggaggctttgggcacagagaaataaccactaacatttttgagctctaacgatgtgctcagaaacaactctaagaggacactgagagaattagaggaggaaaaagaagaacagagacctcaaatagtttccccaag

SEQ ID NO: 671 - DNA, 499 bp, Homo sapiens
  source 1..499: mol_type = other DNA
tagtttccccaaggtcacacagcttataattagaactagaattggaactccaggctggcttcagatctgcctctctctcacgccctctttaagatcctttgcaaaccaatggtagaagcctgtatgttggagaggtggtaccttcaactatgtcccccatcaccgcagaggtggcacatggcagggatctgatggagctgaactgacatcatttagcatcccgagcctcctctctgggcctcattttcctcctctgtaaaacggggagaaaggccctgacagccacagtctgtgtgaggctcctgagatctcatgtacagaaagtgcttggcgtggagctgggcacgcagcaggggctgggcacacggtggcccaaaggagacccgggccttcactgatgggctttgtggccccggacacacctaggactcctcacctgtaagacaggcaccattgtgccatcccatgttctcacccagaggctctttttctcttccag

SEQ ID NO: 672 - DNA, 499 bp, Homo sapiens
  source 1..499: mol_type = other DNA
taggcatgcttagcagccccaaactcatgcccctctcaggcctcaccccccattcacccacccctgggctggcccctagaaccccagccctccctggcctcccgccgggccccaccatgtccccagtcagtctccttgctccccctgcagctgacaagccagagacgaccaaggagcaactgggagagttctacgaagctctcgactgcttgtgcattcccaggtcagatgtcatgtacaccgactggaaaaaggtaaacgcaagggattggacagtgcccaccttgtccatggcccaacttgggcagccccagaggcccagagcaggaaagctgccaggcaaggctgcacagctaggcagatcttctgcttttaggcacctgcctcactgtagggacagctgagctctacagaggcccaggggtggtggatgagagcccaggagggagaagtccctgtgaaaccagggaggacctgaaagctaacaggagggaacagc

SEQ ID NO: 673 - DNA, 499 bp, Homo sapiens
  source 1..499: mol_type = other DNA
gtaagtaaaacaagctatcttcatttttcaatgcatcttagttatgacgaatgaagagttaaatttaacagattctgttaacttgaaaataacttgctacttctgagaacagcaagtgaatagtatcatctctgaatgagaaagtcatggaagcattttgatttgatgagtagctaacaacatgacagcttttatggaattgttatttattaaaatttacgttaagtgattattcaaattcctcttcaaaaaagcacaaaagaaactccagataataaactttcttgacattttttgcttattttaacttggtgtttagttttctttgtgtttttcatagactatacacagttaaaccagggttatttaggagtcaatctaatactgtgatctgaaaatctgttgttgtagtgacttctaccatacatttatgagctgacttttcacaatttttagtgtcattattgagataatatgcattttaagtaatgttttaaaa

SEQ ID NO: 674 - DNA, 499 bp, Homo sapiens
  source 1..499: mol_type = other DNA
ctaggttatgctcagaccatttgcagcaccaaggacactgccattcaggtcaccaaaaaaagatcatcttgtgagccctgtctaaaccaggccccttctaaaatcatttcagtgtgaaactgagtccaggtgggtcttcatcagtattagagtggacctgccagatgtatgcttgcagatgatgcaacatcaaagcaaatgccctgggcaagagaagaaaggccaaagcaatgggcttactggtttctagctttgagccactcttcatagtgccaaattcccattttagggtccctttatttgtattaataaaaataaattccctgggtgtaagttcctgtaaagtactccctatctgtattcctgggcatgaaagggtgttttagttccaattctagttttcccacttagaggttcacctttctgacattaataattaaccagattatctgaattcttcaagttcagtttatttaaaaggagactatcctcaaaagtg

SEQ ID NO: 675 - DNA, 499 bp, Homo sapiens
  source 1..499: mol_type = other DNA
cgtcttcacctcttttcaacctgctcctcttttttgccttaactctgatggcagtcacacaactgtgtgtttttcttttaattcactttacaccttggtttggctattgctttccatggttcatacttaattggctggattttatttattttgacctttcagtaaatttttttgcggctgagtttgcgtgtgtctccttcaccacctcattttttgttttgcagtcccgttactctgatcaacttctggccagtagattctgcgtgagtactttttttgctgaagggtgctgctaccaccaacacattcgctcgcttggttctcttttgttctgtttatttgtttgttttcttttgttttgttttgttttatggacatattaattccccttccttcatttcagtttttttttttcttttcttgatgagactttgaaagtaccatctacacagatcaggagaatcagagtgggttttttggttcctccaccaggtgaaat

SEQ ID NO: 676 - DNA, 499 bp, Homo sapiens
  source 1..499: mol_type = other DNA
aaaataccataaagtgtggtaaaatttaatgtcacctttttgaccttaagacctataaactaccatttattgagtagcctagtaagcttgtatgtttcttttatttatcataacaacgtgttgaggtgttgttgctcccattttactgatgatcagagcctctgagaagtaaataactcagccaaattagtacatgccaggcctggtttcagagccccatttgtctgattccaaagcctttgctcacaaccacaacactctccttaattacaaaacaagtgtcatggggcagaagactggagtggtcattagttttgaaatcatcctgtcctaaatctgatctcaccatgatctcccttttagactacatcaggagaagatgttcgagactttgccaaggtactaaaaaacaaatttcgaaccaaaaggtattttgcgaagcatccccgaatgggctacctgccagtgcagactgtcttagagggggacaacatggaaa

SEQ ID NO: 677 - DNA, 499 bp, Homo sapiens
  source 1..499: mol_type = other DNA
ttgcccaggctggtctcaaactcctggcttcaagtgatcctcccgccttggccaaagtgctgggattacaggcatgagccaccatgcccggccctgtcatacagttttagaggctgggagctagaagggttgaccaggatggcagcctgtacaggatccctctctgcagcttgcccgcactgtggatctgcctaaggccagggcatgggggaagcctgagggatgctgaggagcacaggtccagctcagtctcccagagagactaaacatgggtgggtgacaatgatgcctctcttcctctgggacaaggcagtgactccaggctatgtgatctgtctctccaaacccatagggagctcagaggatcaatcttgtttaatgattgtatgtgggaggaggtggggctggttaatgtttgtctggttcctcttgggctgtgggccatttctggctctggccctgggttcgttgtccctcccctgggctgggctgacagtac

SEQ ID NO: 678 - DNA, 499 bp, Homo sapiens
  source 1..499: mol_type = other DNA
tgaggagactgggggctgagggaggtgggccagggagggctgatgtggcacagtgggccggaaataggggccgggtcttgccttctactgacctccgccttcagccacttaggtcccttccatgcttccctctgaagctggggtgaggcccctcctgccaggtgccagacttgcttagcctctctctgcagcctctttccaggttcaacattgcttttcctctcactttttttcctctggccaaagattccccttattcccatagggccagattctcaggaagacttgagggaccccctaggtgcaaggtggccaagtttgtctctctgagacatttcctgccacacagggttagggtttagtgggaatgttgggcactgccaggtgctgttttccttccttgattacaaggcaagccaggcatgcacccaacacggggctgcgagtggatgaataaagcgtgctcagcgggctgcagagggctagccaacagggccaa

SEQ ID NO: 679 - DNA, 499 bp, Homo sapiens
  source 1..499: mol_type = other DNA
agaagaaattgtcctggatcatacaataagctaggatttgctccagaccatttttttcattttatcaggctacctacaattaaggaatttcagaagattttgtgaacaaaaaatgtccaggaattatgtgtgtaataaatgaatttgatattttgatctccttatccatctttttcttgataaaatatcagcttttttttttccaatgtagggcagaagcaagaagtacagatattttgatggggacagcccacgtctgatagggtgggacatggggcagcagttagagggttgtgctctttctagtgtgggatagtttgcaagatgatatgttgtagccacttctgcagtgacggggacagaaggagtcagtgttcttaactacagtggtagcagcagaaaagaagggtaagcagggttctagaaatttgtgttatgttttctccccactgtatttatttctttggttagtggtgcaagaaattctgttttcctgtag

SEQ ID NO: 680 - DNA, 499 bp, Homo sapiens
  source 1..499: mol_type = other DNA
taagttctacttcttggaaaaaaaaaaaagatcgccaaaattgtaaccaaagccatttaaaacaaactcctcacttaacatagtgccagggcatgcaattttgtttcttactctctggatgtgggatatgcgagtgtgtgtgtgtgtgtgtgtgtgtgtgtattaagctttctgtttctgatgaaattttcatatgaaatttactggagataagattaaattagtggaaaaacaagataattttgctttctatgtagtggtcaccaagttaaagaattgtgccagttattaggcaagataggctttgagatttagggacagttaaattttacaccaacttagtgaacatgagacttctacctagtgttacatttcatttttaaataagcaatttaaaaattggtaaatgatttgtttactttgattatattctggtataattttctgacaaaattatctgtgtcttggtcagcattgttgctagaatatgtattcagat

SEQ ID NO: 681 - DNA, 499 bp, Homo sapiens
  source 1..499: mol_type = other DNA
gtactttttaaattgatctttgaaggcttgggctctttaatggtagtttataaattattaaaatttattcattaaaatattactctcacatttctggtggctggcagtcttaaaaatataaattaaactgagttgtagtaattaaatataaattaagctgaattataaacatcttttggtttaaaataactaatataactaacgaagaccacagggtgctctttatttttacagtacattttttctatacttcctttgtttgaaaaatggggtgtaatttttggtagtccctcttaccaaaccctcaaattaggtatcttattattagtacaatggattatcttcctaaatacctttgtctttaactgcattctgaaccaaaccaacaaatacattaaaaattatgtcagaataacgtatagacgattccattatcaatgtttctaatcctgggaattctattttagaacagccatggcacaaacatcatacagagtac

SEQ ID NO: 682 - DNA, 499 bp, Homo sapiens
  source 1..499: mol_type = other DNA
aggttaagaaattttgttgtaatcactcttgttaagcataagagatacttaattaattgagtcacttaaatagtcttacttggaggccgggtctggtggctcatgcttgtaatcccagcactttgagaggcagaggcaggaggatcacttgagcaaccgggagttcaagaccagcctgagcaacatagcaagacctcatctctatgaaaacatttaaaagcagtagtagtcctagctactcaggagactgacgtgggaagatcgcttgatcccaggagttggaggttgtagtgagctaagattgtgacactactccagcctgggtgacagagtgagaccctgtctctaaaacaaaaacaaaaaagtcttatttgggatattatgttcctacttgaactgtaacaggactgatgagacaacagtaacttcaagttaaaaattaatctttttttcttttgaaatttcttacataataaatacaaataagcagttgcttggt

SEQ ID NO: 683 - DNA, 499 bp, Homo sapiens
  source 1..499: mol_type = other DNA
ggcggccaagccggaggcccgcgccggactcggagtcggccctggcttcctaagatggccgcgctgccccgcggcccctcgcccctctctgcccgggatctccctttggccctttgaccccagcttaccgcacttcttgtccctcccgcagattcccctcttcccgcggcctcgccatggcgacccacggacagacttgcgcgcgtcgtaagtaaagctgggatctctgcgggatggggcggcggagagtcgaagcctgtcgaccagaaacccagtttgtttccccctatctttccaagaacttggaaattcggctgcttttggtggtcgccccaccgtctgaccacctcctctgcggaggaggggctgggctgctggatttcaaatggggaacaaggcccggggagttggtctgtggccgcatggacttttcagcctttgtacatgtctttgacgtatagaagtaaaaagttgttaattggggattctgcctttggag

SEQ ID NO: 684 - DNA, 499 bp, Homo sapiens
  source 1..499: mol_type = other DNA
taagtttgaagcgctatttgatatttagttgatgtagacatttgagtgaaacacacatggcagtattttttccaagtttcaatatttaaattcccagtattaaattctcttcccactccagggtgttggttttcccctcagcgaagatattaaaggacgtatcagggtaaagggcctagtcttaggtttcggttttatctaatttagttaaatcagctcatctcagtgaattttggcagatacataaatatccatacacacaaatacttgtttgattctttgtacttgtccagtcctaggaagtgaggctgtaggtaatagactgtttttccgttttgaaacgaattccccaagtttgtataatcatggttatctgttttagaaataattcgttggtggtatctcctttatgggtcgttatagttctattgtagctcctgaccgcataaaaaacattccaacaaatgggattgcttgaattttaatatcagcagtgggt

SEQ ID NO: 685 - DNA, 499 bp, Homo sapiens
  source 1..499: mol_type = other DNA
gtaagtctgccttatgttcctccagccaattgcaaagggtaagttatttgactgctatttttagacaaaatatattcctggaagcacactattataatagatcattgtaaagcaaaatactccctctgaacttctttgatgtttcttttgtcttcctattttttttttttttgagacggagtctcgctctattgcccaggctggagtgcagtggcactatctccactcactgcaagctctgcctcccaggttcacaccattctcctgcctcagcctcccccgagtaactgggactacaggtgccctccaccatgcccggctaattttttgtatgttttagtagagacagggtttcaccgtgttagccagaatggtctcagtctcctgacctcatgatctgcctgccttggcctcccaaagtgctgggattacatgtgtgagccaccgtacctggcctcttttgtctttctaagtctgtcattgtcagaaatagcggagt

SEQ ID NO: 686 - DNA, 499 bp, Homo sapiens
  source 1..499: mol_type = other DNA
tatacatttattagctaataatttgatatatgtatggtaattcaacatgtatgagttatattcactatttcatgtttaggcagctgtattttaagtgaactatactaaatatttgaaaggcttttgttatcaagggctaagtctcctattttttgatatagcattacaatgtacattttttatacacaaaatatagaatacactgatttccctcaaggtcataaattcccaactggtcattaatctgagaatattgaattttgagtatattctaacatagaatcatttacttcagtgtttctccatcatcacagcacattggaacaaccagggacttttaattaaaaatacctgggctccaatccaatacaattaaaccagaatctcctagattggcactggaaagaaggagtaggacaaaagaacattttatttctatccatgggccaaagtccactcagaaaaaaagtataaattggatctaggtgattgtttactt

SEQ ID NO: 687 - DNA, 499 bp, Homo sapiens
  source 1..499: mol_type = other DNA
gtgagtgaagacccttcagtgttgcctggtctcttttcttgagcgttttcatgaaaacgtaaccccccgtgtttttctgttagataatgtttgacccattgttgatactttatattccactcctggatttcagtgaccaccaaaccaatatgtcatttactatcttggtttgctctctgggtcactgctccactgaatctatcctgcagctatgagccatgataggacagattgctcaatgttctcaggcagtcacatccaaagctagtgagcacgtattgtgtgtgaggcactgggtcagtggtttgtaaataattaacacacccacctgtagatgatggaaccacagatggtaagagtcagaagcagccttaaaaatcatctgctcggccaggtgcggtggctcacgcctgtaatctcagcactttgggaggctgaggcgggcagatcacgaggtcaggagatcgagaccatcctggctaacgtggagaaaccccgt

SEQ ID NO: 688 - DNA, 499 bp, Homo sapiens
  source 1..499: mol_type = other DNA
gcctaaaacacatagtggtatctgctttaatttgggtgatagccccttgcttgagggaatgtggctataattttagttttcaaacgaaaatgtaatctcctgttatatcactgtttacaatgagtagttactgaattaccgtttgtatagcattacccttatttttcaggagaggtagagtgtcttgctatccaggagctgaaaatctaactgagatgagacatacacagagcagcaaagtgagtggagggcctcatttgtgattaagagaaaagagaggaaggagagaagagggggcttatgtctttggagaaggtttttgatgcagttgggatcatatggaatcataagaatttagtcttatgggatttacttaaatttctccaaatacaggccattatttttgatgtattaataatctcttaaggttattcaagccagttgaagtttttcttggagactttgagctggcaacttcattgttgcttttcttttctta

SEQ ID NO: 689 - DNA, 499 bp, Homo sapiens
  source 1..499: mol_type = other DNA
gctacctattagctacataaagtatctttctctccacctcttatttcctacaggtgaccccaaaggagccatgataacccatcaaaatattgtttcaaatgctgctgcctttctcaaatgtgtggaggtcagtggtcagttgaaaaagaggctctcattaaaatgtgaatctgtcataagatttttatttttgaggttagagcaggcagacacacacacacacatacacacacacacacacacacgttaaaggctggagtgtggacaaacaccagcgtgttctttgtttagaggactgtacattttcaagcgttggtcttttaggatcactgcaaatttctacactatatgcagttcaaggcatctcagatctacacagtgtaccgcctatacagctgtctgtggtagtcctgggaggaggtagttttaaaatctccattggaattgaaagttggcattaatctcatgttgcctcctcttacttccctggcctacatag

SEQ ID NO: 690 - DNA, 499 bp, Homo sapiens
  source 1..499: mol_type = other DNA
tgagtgttctgtgttcctagcagtatgtggcaagggggtcctgacttgctatcacatgtttattccaaaggcagctacacagtatttactgttctttctccggtgtgagaggtgcaggcaaggagttggctcatgggagccctaatcatggcatggcccctcatttcctgcagagtcttcctctgctaagtctgcatgtgtccagggaggatagtacttgctcctgccttcatgggggtgtgtgagtctagtgacatcacagctaggagcttactatctatctgcccttaattctgagctgacacaagacattgtcttctttttaaattttattttggttagaatttttgaaaagatctaggattagagaaaaggaagttccctacagaggatcagggaaggagcatttgatctacataaggtgtgagatgtcccccgcgccggtttttgcacacctgagtgtgtaaggtggtgctgtcagcatggtgcataccggagg

SEQ ID NO: 691 - DNA, 499 bp, Homo sapiens
  source 1..499: mol_type = other DNA
tgaggtttaaaacaaaacttttgaagccaacaagcaactgtgggcaacacttcaaagggcccagaatcaatgtttgtcaatagcagttttgcatcctttaatttatgtctcatgaatataaagtgtgatgttattaggagcccatccatgccttaattctgtttgagatttgatgaaccagaagtctattaacattctgtacaaatcagcactggcagaggcctgtggcacaggcttcacctgatcttttatcctgaggctgggatgctagtcacgctgtcaggcttcctgctcggaacacccagcagctgtcatgtgcaccgtggagccagggggctatgtcagctactttctttggagagtttctccccagaagagaaaccacttcatgactcagcccagccccaaagttgccatttgtttaatcaagatagttagtttgcaaaacattaaacattaaacagtatttgatgcctagttaataatttgcatcctcttc

SEQ ID NO: 692 - DNA, 499 bp, Homo sapiens
  source 1..499: mol_type = other DNA
taagtgttcttttctaatatttgtagttgagagactccgaagtttactaggaggaccaagctaggctgggagtgatgagaaactttagagtgaaaggctggagttgccaagttggagatgttctaactacaagaaccaatgcaggcctgtggcttggtttcttttgagcagccactcccatgggaacaggtgtctgacttgagccatcttggagcggagcctccatgaatgcattccagcaaaggagactggggcaagaaaatgtgccccagggcatggattgtaatctgtcatggatctcatagacccctttgagaagccatggaaagctataaactctctccccaggaaaatatacctatctattggtgctgacacacacagttttccagcgatttgtggctgacactagggtaagaagcaatgtgctatggccttagaggggaagcctgctgactgcaaaagatcctggcagtgggtctgcataaatagtttggat

SEQ ID NO: 693 - DNA, 499 bp, Homo sapiens
  source 1..499: mol_type = other DNA
gtaggatttgagctgtgtttcccgccctgatcctctctcctctggcggccggagcctccgtaggctccaagcctggcccagattcggcccggcgcagccggccttccgcgcgtcccgcacctggcgggggctccggggctccggcgcggcaccggggggcgctcgggatctggctgaggctccaagcgccgcgtggccggctcctcctgctggggcaggtggcggctgcgcgccccgcccgagcccaggggccccctcagccgcaacaaccagcaaggaccccccgactcagccccaagccacctgcatctgcactcagacggggcgcacccgcagtgcagcctcctggtggggcgctgggagcccgcctgcccctgcctgcccggagaccccagctcacgagcacaggccgcccgggcaccccagaaacccgggatggggcccctgaattctctagaacgggcattcagcatggccttggcgctctgcggctccctgc

SEQ ID NO: 694 - DNA, 499 bp, Homo sapiens
  source 1..499: mol_type = other DNA
ccgcatctgctgctgtcccgccggtgctggcgctcgtctccggctgccgccggggaggccggcgtggggcgcgggacacggctgcggacttgcggctggcggctgcgctcgctcctgctgggcgccccgaaatccgcgccactttcgtttgctcattgcaaagatctcatttgtggggaaagcggctggagggtcccaaagtggggcgggcagggggctggggcgagggacgcggaggagaggcgctcccgccgggcggtaaagtgcctctagcccgcgggcctaggactccgccgggaggcgcgcgcggagcgcgggcgaagtgattgatggcggagcgaggggggcgaggggggccaggggggcgcgagattccgccggcggccccttccccttggctaggcttaggcggcggggggctggcggggtgcgggattttgtgcgtggtttttgacttggtaaaaatcacagtgctttcttacatcgttcaaactctcca

SEQ ID NO: 695 - DNA, 499 bp, Homo sapiens
  source 1..499: mol_type = other DNA
gtgagaatatctttgctttttgataaaacacagaatgcatagatttcacatctcactatgtgagcccccacaaaacaaaacctagaggagcatgtgagaaaaacgcatctctaggctagaaaacaaaaagagaaaaaaagaaaaatgtctgtgtaagaaagcaaaggaaagaagatgctcaaatccagcaaatcataccagccttgtcataggcacaaaaagaaagggattaacctaagttacaaggtgaattatcataaaatcagatgaacctttctgaaaaatagtcatgggacaaaggagggatatataacactagaggcttaaccctttcctgcagagaaaaaaaatgtaactgaaagaaatgccactcaaggcttgtgacattcaaagtgaagacaagataaggtcttatgtagtacatgacataggtgtagacactcactagactgaaaggagtacatgtttccaaagcagctttaattcacgtctctgctga

SEQ ID NO: 696 - DNA, 499 bp, Homo sapiens
  source 1..499: mol_type = other DNA
tgacctaattgtattcatttgtcaagaggccggttccatatcggagacaggctgtattcatagatgattttaaggacagtttaaggcatagagttttactctaaaaactgagaaacaaaaaatccttcattgtagaatttgttttgttgccctagctctactatttatacttttccactttagctatgcacagaacatagctaattttcatctcaatttttcaattcttttgctatataattgttaacatttattgaccactaacctcattttaaggactgtgctaagtattttatatactttcctggggaggcacttattcctcacttttgatatttccctccacgtggggaacatccattagagtaactctcctggcctgtatctacttacccccaggagaggagaagagagtttggtgagtttgagatgaggaacaggatgtctgatgaagatctaatataactcatgttccttttaccttctccattgtctttca

SEQ ID NO: 697 - DNA, 499 bp, Homo sapiens
  source 1..499: mol_type = other DNA
tgcctttatggtattcaccattcattgttaattcctagtcttgcttttgcttttggaaataattttgaataagtgcactttttaactcaaactgtaacttgagttttgttccctttaatatagtcatatttggtcaattaaaagcagtttttttcttttggctaaagtgaatgggaagacggaaatagctttagaagctacccagctccttctaaagcttttagatttccaaaatagagaagaatttagaagactactgtatttcatggctgttgcagcaaatccttctgagtttaaattacagaaagaagtaagtcttttgtttaactgttagttgtatttaatatccttaatacttacaggttaagtattagattattccatcttcagcatcaagtatgctgaaatgtataatagctattaatatttaatattcccttttatattaaacttgtctcttaaatatatactattggatatatttgttttatttttatag

SEQ ID NO: 698 - DNA, 499 bp, Homo sapiens
  source 1..499: mol_type = other DNA
taaaattgtgaaagtagttaaattgagcttatgtaatagatcactagattaaaatgcatttgaataatgtcccatgtcccttctttttcttaagattcctggaactctacataaaattgtaagtgttaagcttatggccatacagaacggaagagatccaaatagagatgcaggtaatctgagaaatattattttcatgatcttccaaagacaaatttcaggtgttttttgaaaatgttttgctataagtagttggactttaatttcaaccaaatttaaaacattctcctcagagttattcatacaaagcaactttacaagtgttagaaagtcagcagtgcttaccatcttcagtgcatattacaaaatggggaagaaaaacataaagacaagaatattgcttgatttttctgcttaaatatgaggaattgagtcattaactgaactttttacttttaaactttaaggatatatttattgccagagaattgatcaacgt

SEQ ID NO: 699 - DNA, 499 bp, Homo sapiens
  source 1..499: mol_type = other DNA
tgagagaggagaccacaatagaacactggatcgatcgggggatctaggcgacatggagccattgaagggaacaacacccttgatggtaaattctctttatatactgctatctgtctaaggctagttctattttgaagcctatgtgttttgtgaaacacaaaaaaaagtacagagaaagatcgcatccttttctggtaggggttttcaggaaaaagtaagagttctgactcatgttgggatttcttgggccgttattctgcagtggtcaaaatgggggaagcatgtctgtaaaagtgttactgatatgactaacactaactgatctactttcaaacattacctttttcctctccctccctgtttatgaatgttttgcccttctcttactattatatcttgttttgtttgagtttacaaattttcagagtttccctagctctggcacacactcatgaggttcctgtctctactcatactaacaaattgcatgtgttcacag

SEQ ID NO: 700 - DNA, 499 bp, Homo sapiens
  source 1..499: mol_type = other DNA
tatgtccttcagtcacccccaagattgttcttgaggaaggaggctcctgagtgccagcaacttgtcaatcacgctaatctgatcaggccagagactaagtagtctcagccacatggggctcgaggggttctgcttttgtgattattacctcttacgagtctgggacatgcagctggtgatctgattctccgttatgtgctgctttcctttctccagatttgctcaacttttttggggggggtctccttaatcccaaccccattaacattctctctttctcttttttctccacagcagaagatttagcaccactatctccgttccatctgggcttatatgtacttttattttttggtggtgaaattgactgatgattttcctttttcttcgctggactattgtgccaactgccaggctgcctcctgcccttacagccctaagtggctgccttctttccatcaactcccaacttcttcctgtgaagtttaattgtctcaac

SEQ ID NO: 701 - DNA, 499 bp, Homo sapiens
  source 1..499: mol_type = other DNA
gtgagcaaggttggaggtgattctgcccctctccccaggctttctgtgtgagtccattcctcctctcagatttattgttagaacttaagacaagccaattacatttcataatgtctgtgtcattcagacgctgagaactaatccagccttctaaatggtgcttcttaactcctttcttcaacaggagagttaatgtgtggaattaagtgcagaatccatggccctctgtggtgacggtgatggttcaggttgtgtttctgggttcattctggaagctcccccaaggaaaggaggaaggaagcttgcagggtggggctttgccattgccctgactggctctggtttccttgcctgatacattgaagtcagcttccaaagaatgccacccaaggttttgaaggggcacagtgcctctgtcctcacaaaaccagcctgcatatgagtttactgaattcatttaggtcctgctgaatctttcccatttgttccttctctgttt

SEQ ID NO: 702 - DNA, 499 bp, Homo sapiens
  source 1..499: mol_type = other DNA
ttctggttgttacacatagggtgggattgtgctggcataggccagggagtctgctaagcatcctacagtgcacaggatagccacctactgtaaagaattacccagtccaaagtggcattagtagcttttttgagaaacctgtcccagatcattaatcagaacgtgttattgatataccagtcttctcccttgtagttaggttggtagaattcagactctggaaaaaactgggaatgtaaaaggctgaatgagtgtaagctgaaagacaagagaaaggagaattgttttaagcttactaaagccaaaatggaaaaaaaaagaggggggaggattggggggtgaggaagacagtcaacagaccgcttttaggccatcattccgaagggttctgtgctaggaaccttacacgtgttgtctcacataatccttaaaactcagaaatgattttaaattaaatagcacagagaggaaaactgactggagagggagcctttgctta

SEQ ID NO: 703 - DNA, 499 bp, Homo sapiens
  source 1..499: mol_type = other DNA
aaaatggggctaatgtacacctcgctcataggagtgatgtggggttgcagggcagagttactgagcccgtagtaagcgctccataaatgccagccactggtgttgtctggcaggagctggcgttacagtggttggggatgctggggaagtgtctgactgtcccagctccaggtcttgccaactgtaggagtaaggggagaatttgatgggaccagtgggtggaggaagaggagtgatgtctgtgaccagaaacatacagaggtcagcacaggaccctgatggtcagtgggtgtgttgtcttgtatatgggaccaggctctgcaggttgaaaaaggatggggtacgtccctgagcccccagcctagatcatcagatgggagagaggctggctctgggtggtgggagagaagggcataataagaacccttcaacgttgatgcatggcccttgggggctggaacccctccaacctcatgttgcccatgtctctgcttgttag

SEQ ID NO: 704 - DNA, 499 bp, Homo sapiens
  source 1..499: mol_type = other DNA
taaagatcttgcttgggaccattggtggtggtgatggggtccagatgcccactgtgtgccaggcctggggcacaggcatgagcggaattcaatccctgatcttagggctcacaagctcatggggtgacagacctggcccagctctcctagagcggggtatagaggcagagtctagacagcccgtcaggaagccacctcggatgcaggggtggggcgggcttgagggccagacagccaagaggccccagtaacccagagcccctgaggggttgtacatgccagggagggggcagggtaggacggtgggccttcattgtcccctgagcaccacctccctcagcctggatgcccagccccgtgatccacggcagcgccatcgacaccacctgtgtgcactgggccctgagctgtgggcgtcgagctgtctgtcgctactacaataatgacctgctccgaaaccggtgagacctggtttgatggcttgtgggaagggtgctgg

SEQ ID NO: 705 - DNA, 499 bp, Homo sapiens
  source 1..499: mol_type = other DNA
gtaagtaaataaggagagcttcaatagttccatggtagagagaggcctgctggaaggttcagaaaataggccgtttggaaccttctcctttaagccaggagggcggctttgggaggcgtcttgaaatacattcttgactctgctgggaaagctcggggagccagaggcctaataccccccacttcaggggaagctgtgaaggcagctgcacctcctttgtcaagctgttggtttcaaccacagacacgaggacacacttgaggtggggggataaggggagaagcctgccgccccgccccacccccgccagcacaccgccctcgccattcctctcccgccccgccccgcccggcgtctgtgaccccgcgggccgagcctcaggcgacctgttggcagggagagtcacgtgatgcgccggctgtgcactcccctcgggcgggcctcctgttgcgcccgcctggcgagttccatcacgtaacgcgcgggcgccgcccagctc

SEQ ID NO: 706 - DNA, 499 bp, Homo sapiens
  source 1..499: mol_type = other DNA
tattttggatttggctggcagatggtgtacacagactttctgagaatgttagcatttcatttgaaactagcaagattacatgtgactatcatggtaacttagcactcacatatttttcaacttatccctaaccctgggttgaatgtagaggctctaataacatataaaaggctttgttaatgtatggtctgggtctcattgaatagtatttcaggatgtaatacttcttttaaaatgtccacagggcagtgtcaacgtctttccatggaaatctggctcacccaataagagaaaagaggccaaaggtaagaaagactaaaccaggggagatggcaggcagtgatgtctggactgtttgaatgggacttctccatttaccgcccctctcacttccttctatggtctggacctttaatcaccacagcagtcagccatgtagggtcaagctaatcgctgttgacatcatcctactacttcccttttcaaattccagtgaagc

SEQ ID NO: 707 - DNA, 499 bp, Homo sapiens
  source 1..499: mol_type = other DNA
tttagtatgtgacttgcaaatttttcttgacagccagacaaaatgtattgggtaaaaggaattgctgtatataagcctttattaatgtggtgtaaggcgatgaagacaaagtagcatcctgtagttctatgataaggcctcaatcttttagtgagcctgtacctctggactgtgaacttcaaacttgcttctcagtttctgtctcccactccttaggtagaatgagatggcttgagggggctggagttatgtattttcctccctcccaaaggaaggctagagacagctggggtttagtttctgtagcttcatatgtttttttaataatagaaaaatatcttatgcccccaatgaaaataataaatagaattgttctcttaatatttgtatgtgtaacttgtttttctttcttttaagatatgcatactggggagaaaaaaatgtaagatattttacacatttaaaataataatcgactctctattttctcttttcacag

SEQ ID NO: 708 - DNA, 499 bp, Homo sapiens
  source 1..499: mol_type = other DNA
acccattgataagatgtgtcttcattgcatctgtctgttctctgggagaagcaaaatctgtgttacttccttgcatacttgtttgtttattcattgtgcacaagaagatatcttccacatcttcacaagctggataagaaatagagaaaatgagatcaaatatttaaatattgcattttctggtagtgatgcaggatatttcttggcctcttcactggactcacaatagaggtgccctgtttatttggtctgccatgctcaaccccttgtgggagggagagtgtgagtgacgtagtgcaggaccatgtgggctgtcctggtcatcgacacagaaacaagctctgtgagtttctcatggccagaccaggtgcgagtgagtgaatgctggacctgggcaaccgctccaggcactgaaacgagtgagttacatgcagggctggcagccaggcaaggtgcaagggtgctcaggatcctgaagccccagaggggttgttatggt

SEQ ID NO: 709 - DNA, 499 bp, Homo sapiens
  source 1..499: mol_type = other DNA
aattactgatgcctgaggccacctccagagatctggtttaattattggaatgcagcctccactgggatttctaaaagctcccagaagatgttattgtgcaccaggggtagtgaaccacagacctgagatgtcagggtcctgagagctcatctcatccagtggttctcagccctggctgcagattagcatcatctggagagctcatgaaagaagcactgaggtcccaccacctgaaacgacctttcagaggaaggagccattctttttagaaggtgctcaggtgattttgatgcacagcaagagttaaggttaactgacatcttagccatcccatgttatagataaggaaaatgagagcaaaaatggtcaaatggcttgtacgaggtcaggtccttgttgttacagaggcaggtctgatgccgcctcctgctctgtctgcagcctaacaccatcccttatattggcctgttgtatttattgatgcctcctcatccttcag

SEQ ID NO: 710 - DNA, 499 bp, Homo sapiens
  source 1..499: mol_type = other DNA
taagatccccttcctttgtatttgaacagcatccttccttctttttcccctccgactgtcagttccgggagaacaggcctgtctttcctgttatttctgtaacagtagtggggtttcagataatatttgttgaattgaagttctgtaactttttattcctcagtccacatggattgctgaaaataatccattcctatatgcatgcttcagaaaagaacttcagaaagcaaaagttattttttttttgagacagtctcactccgtcacccatgctggagtgcagtggtgcaatctcagctcactgcaacctctgcttcccaagtagctggaattacaggtgcatgccaccacacccagctaatttttgtatttttagtagagacagggttttgctatgttgacctggctggtcttgaactcctgacctcaagtgatccacccacctcggcctcccaaagtgtggggattacaggtgtgggccaccatgcccggctgcaaa

SEQ ID NO: 711 - DNA, 499 bp, Homo sapiens
  source 1..499: mol_type = other DNA
gtgggtgtgggtacctctgaccggacctgcttccctatccctgggacctggggtggggacggtgggagccccctgaagccccttgggacttggggtcctgttgttctgggccaagaagggctaggagttggtcctgacaccccatttgtctgggtacaggctggagtctgggatgcagaacatgagtattcatacgaagaccaccagcggctatgcaggtgggtgtcccagggccctgggatgagggcgggaggcagggcccagggaggcctcagctccagggagggggctgtgctcagtcgctcacagtgacctcagcctgagcactcatgttcttgggagaatcctagggtggggaggcacatattcaggaccccagtaataactttattacttagtaactttactattagaaagcacccaaataaaccatagctgtgtgccaggcactgtgctaagtatcctacaggttttatgtgatttattttatttattaatt

SEQ ID NO: 712 - DNA, 499 bp, Homo sapiens
  source 1..499: mol_type = other DNA
aagggtgtggaggggaagcacctggaaactgctcatgtctccctgatctgcttccttagtctcgtttatttatttatttatttttgagacagagtcttgctctgtcgcccaggctggagtgcagtggcgtgatctcggctcactgcaagctccgcctcctgggttcacactattctcctgactcagcctcctgagtagctgggactacaggcgcccgccaccaggctggctaattttttttgtatttttactagagacggggtttcactgtgttagccaggatggcctcgatctcctgaccttgtgatctgcccgcctcggcctcccaaagtgctgggattacaggcatgagccactgtgcccggcccttagtctcatttaatttgagctggggggagtcagcctaggtggtggtggggaggaccctgagggagggtgggagcacgggagaagagaaggcatacccaacctgacctacttacctgtcccctaccccaca

SEQ ID NO: 713 - DNA, 499 bp, Homo sapiens
  source 1..499: mol_type = other DNA
gtgcatacagtccccttcttcccaaatcccgcccttcaaaccattggtccagagaatcatcatggactagggagtttaacatggctggggtaggaggctgaggggagggggactggagagaggattgattggagctgggaggtcagacatggcagttcttcctgatgctggggtgagggtgagaccaaagcccctttgctggggacctggaaaaggaggaagggctctggttgggcagctggaggaggagccactgacctgcctttgctccaccccatccagggctgactctgtggcctggaatccccacaagctcctcgcagcaggcctgcaatgctctgcacttcttctccaggatacctcggtgggtctgcccctgcccctgcaccagccccacctctctctggagctctgccttctctatcccaccttagataaagttcaggcctttctctattctctttaccatcccttctgaagctgcatctcagctaccacc

SEQ ID NO: 714 - DNA, 499 bp, Homo sapiens
  source 1..499: mol_type = other DNA
cactatgcctgactcaattttttttcaatagcattggatcttccagtaaaacattcaagttctttgagagtatgagctttggaaatgaaaacctaggttcgaagtccatctctgcagcttctgcttggatctttgaatctcagtgtccctggctgcacattaaaaaggacagtaacacattgttgtgaggttgaaatgggccattttaggcatgcaaagagcttagagctgggcccagcatcaggctctgagtagcttttgagatgactttacatctttctccctctacattttggcaacagggtgctgtgccgttcctggtcagtgccacctctggcaccactgtgctaggggcctttgaccccctggaggcaattgctgatgtgtgccagcgtcatgggctatggctgcatgtggatgtgagtgggacttcggcttgggggtgcggtggggtgggctgagccaaggccaaggcccacgttgttcctcctgctccaca

SEQ ID NO: 715 - DNA, 499 bp, Homo sapiens
  source 1..499: mol_type = other DNA
gtaaccacccaggtttgtcaagtctgtctgtgtcttccctctgtgtgaagggaccacctcctgtctgctccctgggaagattcctacagtgtctttccaggttgaagtaacagtagctttctaatatttctcacttaacaggctgcctgaaccccatctcttttcaatccttaacctctcccgacattggaggtgtctagtcttggggagagtttgccctgatgagattttctctccagaattcctctctatcctctccctcctgtctaagcagaagtcatgtgttgtttgatgctaagagcctgggttagagatctggagacttgctggagcatcgttgagaagggagcacagggctgcaagtgtgcacggaggctgtgcctgtgctggagccaggcttatgttcccagcactttaccttgtttttgctagggcccatcagcgtccactgagagctacgatcatctccatcttcagaggagagtatcagcttaaggac

SEQ ID NO: 716 - DNA, 499 bp, Homo sapiens
  source 1..499: mol_type = other DNA
ttctcatcctagacagcctgaccgtgccctagttttcagaggagtgattgattctggggtgcggagcaggatgaggaaactcaggctcagagagggatttccacctaatgtgcctggaaaccatgggtagctacccaataaggcctttctatgttcagaaggtcatggaccaggagtgttggtatcggagctttgtagagacagttttgacccctgtacttagagcagaggggtgtgtttgccatggagagtgtgtgtgggcagctgtgtgtaagcctgtgtgagttctgtgtatgttcctgtgtgaatatatgtgtgtgctccttcatggacacagcatgcatgtagtgggcatagcaaggcagagagaaatcaggagactaggggcacattgcccagtaggaagatagtatcttcctactgggcaggacttgaggtgtgcaaaggtgtgcatgagtactgcaaaagcagttcaaagagcagagaggtggggccagaa

SEQ ID NO: 717 - DNA, 499 bp, Homo sapiens
  source 1..499: mol_type = other DNA
aagcagtctaccttacttttttttttttactatattgttctgaagtcaggttattgcaagaataatccatatttcatatatttttaatgtagaagataattgacttatttggggacaggtggaaaagggctttatcatctattcgtactgatttactttgcagatacaaactgtataaataactttgaatcatttttaccattctttctcatttgtttgccctttctgttgttcattcctgtccagtccattctttacatgatagccggaaatgatttttccatagtagggctttgatcatttatttcctcatcctcccaaagcaaaaaaatatttttcatttaccgtttcctaccaaattgcaaagaatactccagtctgactccattctagtcacactttatttcccacaatagatttcatttcccctactctgcactaaactaaaattctcaatcttcccaaattttttcaaccttttgtttatttcattatccag

SEQ ID NO: 718 - DNA, 499 bp, Homo sapiens
  source 1..499: mol_type = other DNA
taaataatttttcttttcattgaatgcaaagcttttttatgtgtacttgtctcgaagcactctatttgtattacaattatgcatgtacatgactcatctccctttacattgttaagatttttgaggggcttttcagaccatgttttgttctattttgaatcctctacaacattgcttttcaaagtatggtttgttggaccagccattgattggcttcaacagttttgttactggtctgggacaagatagtgagctggcatcagaatataaatcagatgtgtcactaaacacactgcttggttcagctgacttttttttatacaagaagacattggtaaagaagaaaactgtgtgttggtttacattctggcacaagcttcttattttgtagcagattggcaccttaaggagcattacttttaatatccaagaaaaaagtagattcctagtaaattactaatgaatgagttgtaggatatttgttcctgtcaactattat

SEQ ID NO: 719 - DNA, 499 bp, Homo sapiens
  source 1..499: mol_type = other DNA
cttctgactgttatttatgagccttttcatggtatttatcattttagtattgaagatgcagtgttcttttgggaattacgtatgcttagaagagagtactgatgctcaaaggtgaaatgatttgaatctagagttggataaaaagggaaaggatggggaaaatgaaaactgggaagctaaactgagaaggaattgcaaggtttggtgataaaaattcatttgctatggtcatagttgtgtatcgagaggtttgcacagcacagtctcttggcagagtttaggaatctctactctggggattctgcagttcatgaatcgtcagggagactctgcattcaatttgtttctgtgaacatgcaggtgaaagtggtagtacaggtggaacttcatgggaactggttttgggggaggtgtggatggaaagcacaaatgtctcagtattttctaaagggagactatttttaaaggtgtcttgttacaaaccacttgattatagcct

SEQ ID NO: 720 - DNA, 499 bp, Homo sapiens
  source 1..499: mol_type = other DNA
cacaccattctcgagagttagaattcgtagacccgcaacacatggactacccttgccaattgttatggttttatttttaaacctattctgtgaaaaagctcctcggtatttcaaacttgaattacaataaaaacaccaggtagggttgtttttaaatgggtctcaccccagtgctgactactgttgtttaccaactacatttcatctggtaactccattgaaactaagtacctcaaccattttttttttttatcataaagccttttttcaaatggaaagttgtttttgaagatcttgacatcagactttttcaatctttgaaaatgatggaaacagttaataaaaatgtttattttagaattcaggtgatgtctggcttgtgaggagctgtttataagtttgtctttgaaaaaggcttgcacacatcactctgagaccagctgtttcctgtgactttaaccttaccttccccagacaattgagctgaacctgtatctgc

SEQ ID NO: 721 - DNA, 499 bp, Homo sapiens
  source 1..499: mol_type = other DNA
ttatggtgtcgctttattcttaggtatttatagcaaagttaagcgcctctaacagcagttaatcaagcttctgaaggattcagttgacagatgtcaaccgttttaagaacaatatgcttgactcagtacactctttttcccattggctagcaacaaaagagttggaggtatcaggatttcctccccagccccgcaggctcacctggtctttgtcacaagttgtctcagggcagctggaggaggcaaaccctaaagaacaagggcttttcaagtccctgttgtgccacgttcgctaatgtcctgttggctaaagcgagtcacgttccaggcccagagtcaatttgggagggtaacactcaagggcatgggcatgtgatttgacgtgatccatgggcctgtatctgacaatctaccacatgcataaaatcccatcacaggctgggtgcagtggctcatgcctgtaatcccagcactttgggaggccaaggtgagtggatca

SEQ ID NO: 722 - DNA, 499 bp, Homo sapiens
  source 1..499: mol_type = other DNA
agctactcaggaggctgaggcacaagaattgcttgaacctggaaggtggaggttgcagtgagctgagatcatgctactgcactccagcctgggcgacagagtgagactctgtctcacaaaaaaagaaaaaaaacaaaaaaacaagaaaaaaaccacataggtactgttaagaccctggagcaactatccttcactctatccacactgaattctctgggttttgttatttgcttgcttgttttgcttaggaaaagtatgcagcttaaaatctttatgatgactttagaaagttttggactttgtatatttacagtctttaatgcaaccaaagactaattgacacaggtcatgtgtcaaatggcttaaaataaaagcaagcaaacagcagctgtgtctggtcatgtatagagtatgttttgacttcggatgaagttgatgtttaatagcatgtggaaacaatgtcgtcaatatttcaactttgttttgtccttgcttttca

SEQ ID NO: 723 - DNA, 499 bp, Homo sapiens
  source 1..499: mol_type = other DNA
atttgggtgtcgaatgatgccatgctcatgatttgtagagcataataacaatgttagccttaggccatttttatacattatcttgaggcagaagctagttgttactttgctttaccataaaaattatgacttgtgactaaaaaactattcagcagaaccttctaaagttatgtatggatatgtcctatgacccagtgatttcacttctgagaatatactcaacagaaaggatgctcacgtccaccctacaggttatctttaggggttttgattggaaggggaattgggaggcttctgggaagcattacatgtgttgtatcttgatctcgttataattacgtgtgtgtgcataaaaattcatcaggttgaacacttaattttcacattttgtgtacaacatttaacttacacttcaaaatagttaacgttgctataattatgctgaattaatgcttttccactttttaattttgtcattttattttaaacttcaaaacag

SEQ ID NO: 724 - DNA, 499 bp, Homo sapiens
  source 1..499: mol_type = other DNA
tttctttgggaacaaaatttgataaatatacaaactcatttctttaaatgttgaaagacatcctattgaatctgagggggtaatttacagaaagatactgtctctcgcacttttgtcatctctggaaaagtcctggtgaatagtcattcatttgtaatagccctctgatcatttccttttctttgaagttcaaagagaatagcaaacagaaaagttaacaattttcacataaaatattccctcaagcaatcctttcccccatagttagtcttgaggcaggattcacaaattcagagtatgcagctaactgcagtgatgggaccttcgctttcctctcttaaaagtgaggaaatgattggcttcattgtatccaatcatctttctgttttgttttgcttttgaaaacattcctacagctgggagcacagctgctgtatacttcccccaaagcaggaattagttcatttccttccttcattgttacactgttgcattcttc

SEQ ID NO: 725 - DNA, 499 bp, Homo sapiens
  source 1..499: mol_type = other DNA
accttttagagaatctcgctaagaaacatggagaaaacggaaaagaaaaatgtaatgccctagaaagcgcaaagaaagacagtggcaaaaatgaaaaaaaaaaataaaaattataaaagaggcaaaaaaagacacactattctctgcctctaaaacacaattaaataaaagaatttaaataaaaattaaggcttctatatgcatttttaaattttgtatgaatctgttatggaagaattgcctatgtcaatatatgttcagagttaaatattagccccaaatgctcagcaagactgaattgtgtcatagaagttcccagattcccttttcccgcaatgtcattggaggctgcatttcttagtcaagtccagggtttaggccaaagggcatccggtattgcctaaaaccctgtgaggtctgtgaggtaacttttgagaagaggtcactgcactcttcatcttttttgcactttggaatcagatataaaagatgtataagt

SEQ ID NO: 726 - DNA, 499 bp, Homo sapiens
  source 1..499: mol_type = other DNA
tggtcttaaacctcagctgaggctggaagaggaccatggtggcttattggagatgtgaccccagggagcccctctgaaggatggaaggggactgggcaagacccaacacacacagaacacagtagccactggccaggcaggaagcaaggatctcagaaaagacttttaggtgaatgtggcaggaaagcgtgcttgctggggcaaaggcagattcattctttctcttcccaggtgacccagcgcctcttggtttctaactggggagggggtaggtgtcaagagatgagtcccaaagttctggaatggtgggtcttgtgactgaggtctagacccctctccagcatgagtgctgtctcctgcatcatatggagcctgggcattctgagctcattcaaagggacaccatgggaaccacttgttctcaatgcaattatttttgtgatgtttacagtatcagcccccatctaccaacaagaacacgaagtctcagagaaggaaa

SEQ ID NO: 727 - DNA, 499 bp, Homo sapiens
  source 1..499: mol_type = other DNA
tactgtgtctgtgtttgtgttgcgcataaggcagtagtgccttatggcagccagggggaggccagggcggccgccagcgccgcgggaccgaggagctgcgggtgccagcgctttgccagcgggaccacgcggagaggggaattctggaaccagggaaggaaggggacttgctctggagggaaagacggatgacactgcttttgtagagagataaacgcgattcagacaataaagcaagcgatgagccgggcgtggtggctcacacctgtaatttcagcgctttgggaggcagaggtgggaggatcgcttgaggccaggagttcgagcccagcccggtaacatagcaagaccccgacccccctgcgtctacacaaataacaaataaaaattagcctggcgtagtggcgcacacctgtggtcccagctactcaggaggctgaggtgggaggatcgattgatggacagaggtctaagctgcagcgagccctgatcctgacac

SEQ ID NO: 728 - DNA, 499 bp, Homo sapiens
  source 1..499: mol_type = other DNA
acagcgcaaggctccgtctcaaaaaagaaaaagaaagtgtcctgataatgtctgcggggaggatggattgtaaggatacaagattagaagcgggcagcagtcttgaatggtgccttaggaactgtagtagggggatagtaataggacagtttggggatatatttggaggtggctgaactgccagaaaaagaggtcatttccagacttttggggtgcaggagcccctgtggactttccaaggatctcaccgtgccagcctcccctagcagagccccctgtctcccgcctaggagctgaaaatcctggtggactacgacgagaaaggctacctcctgcagatcttcaccaaaccggtgcaggaccggcccacgctcttcctggaagtcatccagcgccacaaccaccaggtactgcttgtccccggcaggcccgaggggacaggcagctagcacactcggttttctgggtccttggctcatctcctctctttcccgccaca

SEQ ID NO: 729 - DNA, 499 bp, Homo sapiens
  source 1..499: mol_type = other DNA
cttctccagtcgttccagtcctccccggccctctacttgagtgggtgggtcttctgatgggttcctgcccttgcgtgtgtgtatagctccaaacggtgtgccaggctcagggcaaggtcctgagcatacaaagatgagttaggcagaccctgccctagagactctactaggcaactttaatgaggaggtcagaaccacagaggtacagatgagagactcctgactcccagtcttcagggaaagctttttgaggagaggatggctgggcttaccctttttttttttttttttttttgagaggagtttcactcttgttgcccaggctggagtgcaaaggcgctatctcggcccactgcaacctctgcctcccgggttcaagcgattctcctgcctcagcctcccgagtggatgggattacaggcatgtgccaccacgcccagctaattttgtatttttagtagagagggtttctccatgtttcatgggcttacctttaaag

SEQ ID NO: 730 - DNA, 499 bp, Homo sapiens
  source 1..499: mol_type = other DNA
taagtcacgggagatgcgcttccatcctgacctcttcctcaaactccagactggtataaccaacttcttccatttctgaaatgatctcaaactgagtatgtcccaaagagaattcttgtttcctccactgtattcaggtactccaaacctgctcaaccaccagcccattccattcgcccaggtgctccttgcaaaaaccttagtggctcctcagggcctctctttcctccggacaccccttctaatgcatcagtcgggccagccagttctgtgttcagcctgactgtatctggagcctgactgcttctcaccacttccattactgccacccaagcctacgccatcatgatcttctgtctggactattgctttcctggcttctattctagcctttaatacaggcaggcctgcagagcggccaaaatgctttttgaaaaacaaaaagcaaatgtgattctcctactcaaaacccaccaatagtctcccatgactctcagaa

SEQ ID NO: 731 - DNA, 499 bp, Homo sapiens
  source 1..499: mol_type = other DNA
ttaagtatcatttgttactattattttctctactgagcgtggaaagctggctgaaaattccagagtgtaatttctgtgggtctgtttctctaaaacttgcccctcacgcagcttgtacagaagttagattggcgcttactcccagctggtggaagattcggaattagctgcgcctctgctgcgtgagagagggctcagctttaaagcttcccagctcctctgctttcccgctgccccctactctgccggatgtaaaataggcctcttaatcttaactgtggctgccaggtgacatacctgaggaaactcactcagcggggctattgggataaaggtgtgcgagtgttcttttctatcgacctggagggccaaggcaacttttttttttttccttctgggacggagtccgtcgccggctggagtgcaatggcgcgatcccggctcactgcaagctccgcctcccgggttcaaacgagtctcctgcctcagcctcctgagt

SEQ ID NO: 732 - DNA, 499 bp, Homo sapiens
  source 1..499: mol_type = other DNA
aaagacggagggtcgctcttgttgccgtggctggagtgcaatggtgcgatctcggctcactgcaacctttgcctcgtgggttcaagtgattctcctgcctcagcctcccgagtagctgggattgcaggcgtccaccaccacgcccagctaatttttgtattttagtagagagagggtttcaccgtgttggccacgctggtcgggaactcctgacctcaggtgatttgcccgcctcagcctcccaaagtgttgggattacaggcgtgagccaccgcgcccggcccactatcgcttaatttaaagagctgtaatgcatgtttgtaatgcagactcaaggaaaattataatttccttaaatgtgtatagaggatgtgtgagagtggaaagatgtctattccaaggtggataaaaaataaaatggtggactacctcaacatggaggtgccagctgtccaattacagctgtcactctgtttctgggaatttctcccgattctta

SEQ ID NO: 733 - DNA, 499 bp, Homo sapiens
  source 1..499: mol_type = other DNA
aggactacttgcatgaccaaagccaagatggcaggtacgtccttttagaatttaaggttagtgaagccatctatttccccgacccccttcagtgaaaatggtctttcgcatctggcccttctttttggaggcgtgcttgccagcagtcaaaatggctccattccggaatagatttaataggaagtgaagctgtgacggcgaggcgttgcccggcctatctttgctaggcgttctcagaattagttctttctgcccacactagacatggcgcttgccagcgtgttggagagaccgctaccggtgaaccagcgcgggtttttcggacttgggggtcgtgcagatctgctggatctaggtccagggagtctcagtgatggtctgagcctggccgcgccaggctggggtgtcccagaagagccaggaatcgaaatgcttcatggaacaaccaccctggccttcaaggtgtggagccagcccccttgccaggctgagtactgaa

SEQ ID NO: 734 - DNA, 499 bp, Homo sapiens
  source 1..499: mol_type = other DNA
tctcaaccgtcctcccgtctctgagatggtaaattactactgacacttattcaggtctgaactgagaatctagtttgtggattaactggaccctttgctttttcttcttccatctgccttttaggcaattcattacttattcgaatttccaccagaaggtaggagtcaagagaacgaatattggatattaataaccggttactgttaaagaagggttgctgtatggcgactgacaacaagaggtatagcacttttattttgttgcgttgttttaccactaattgctgtggtttaactaatatagggaaatggcctcagaatggatcattattttacccaattttagaaggtgcccttaaacaagatggcaacctcaggcgcgttaacaaggtgctgaagcagcagcgatgtaacctgttgcttggacaccaggctggagtgggaggactcaccgctaagggttcagaaccgattttcaaccagtcacgcccttctcaaa

SEQ ID NO: 735 - DNA, 499 bp, Homo sapiens
  source 1..499: mol_type = other DNA
aagtccggacgtggttggcagggcgcaccggcgcgtgccccgcaggccatttttctgactggaatgacggcggcggctggcttctcggggctgccggggtctcccggggtacgccgccgtcaggacttctgcagggcgcagacagcaggctccagcgaggctgcggaaggaaagccttgggtgtcggggctgggcctggcgtcggcccctgggtcgggggggtgggggttgcgccgagacgcctctaggagaagtctcgccgccgccgccaccgcggccgcccgaggcgggtgcccttgggacatagccctggtctttggggttgtgcggctcacacgacagcgcggagtatgaggccgaatctcatcctctagtcccaagcctctccactaccagggctgggtggcttcgccaggtagagcgccggcccctttaagagcaaacgacccggacacgtctgcgaagcttgcgcgaagaaggggaagtttgcggctgtccg

SEQ ID NO: 736 - DNA, 499 bp, Homo sapiens
  source 1..499: mol_type = other DNA
tgagcccaggcgcgatgagtgttacgtggcccaggggtcgcgggagccgccgggggaaggaagcagtagaccggctttggggtctaagccgccgtggtcagaggtcccgaagccagtcctcgtctgctgcccggctcccgcccgtgttcgaggcagtagttaggctcgtagggcgcttgagtggtttttgtgtgatggaggaggacctggggctctgggaaggtgaagaaagcacttgcttagctggactttgcaaagatgtaaatgtttcccgattcctaaaactaattagcctttccgctatgttgtttattttgagcagagacacgtggttccttcgactgtgagaaacttgaggactgttcctttaaattagttacatttactgatgtaacttctcgttgaaccttgaaagaacacctgaggttgggcggggagttgaaattttgattctgcattttttttttttttggtaaagaatgaatgcccttttgagatg

SEQ ID NO: 737 - DNA, 499 bp, Homo sapiens
  source 1..499: mol_type = other DNA
gtactttgataatgttctgctctcccaaggccacagggccctacgattgtctctccctttcctttcgttaggccagcatatgattaacgctacgtgattttctatgaatgtgttttcacgtttcaaaaacagattgatacacatattgaacagtgccagacgctgtcatttgaggcccttccctggtatcctatgtgcttgtagtccttattattttcagagcactctacatagctcccctctgacacttagaagcatagggtctttccaaaaaacagggggctgggggattatctgggggatttaggattgcatcattgctccttcatttttactttttgaccaactctctgcccttagattcctattatagaaaatagggacactccacctactacagtgttagaggctaaatgagacaatgaatgtaaagtgcccagatgggcttggcacatagcagacactgagtatctattgtttacttgttcttccaaactgc

SEQ ID NO: 738 - DNA, 499 bp, Homo sapiens
  source 1..499: mol_type = other DNA
tcccccttccttgcctaacgggcatgcaggcactccaatccccagccaaacagggcactgggcaaggccggccacccatctggatgggcagcctgacgaccagatggtcagggcagtgaatgaagcagatcaaggaaaggtgtgtgaggacccctgattccacctgcttggacccccaccttctgtgctgcctcctgctcccagagtggactctcttgccctggccctcagggaggagacgggatgaatgaaaacggggtcaggactgagagctgcctgccggcctggcagggaatgggaactggaggaggttttgctctgtgaaataatgtcccctctttgggtgagcaaatgtcacccacacttgctctaggtctccctggggcagggctaacctacttgagccacaggaaggaggcagggtccctgaagaagcttttactatccacaaagacattttaggaggcattaaaaccatctctatcctctcctctccaca

SEQ ID NO: 739 - DNA, 499 bp, Homo sapiens
  source 1..499: mol_type = other DNA
tcccctcattcttctgagccccaattcagtgattggtgcaatcacaggcttggctacagtgacccattcattgcaggcatggtgagtctctcaatccctctcatttccactagaatctaactgttgggatctatgacccagtcagcatagcaggcctgtggggagctctcaggttcaagcatatgccccccctaatctacaagaaattagctgcagaaaaccaaggaatagaacctggaaaaagagagggtttgctagagctgtccctttccctgtctctggaatgccaacaatagggaggctctttggtcttgtctctcaggagtgcccatgccattccaggaaaatgatggcccagctggtggtgtaaggcttggggggcagcgagtgggcatcgtggtgaaagcctcgggatcagggagctgcgtctgcaggcaggcctgctggccggaaacctgccaggaaaggaaggggctgtcccggggcggggccagggagg

SEQ ID NO: 740 - DNA, 499 bp, Homo sapiens
  source 1..499: mol_type = other DNA
taagtaccgatgccgcaaagggaggtccccagggcttgagggcatgtgaggcgaggagaggatggactctagagttttggggtttggggtctgcaaagctctgaaggagtctcatctctgcagtttcaggtatccaaggcagcagaggtgagtgggtcccccgagctctgtgaccttatgctccacactaactctggcagagcctccgtttcctcataggtaagatggaaataattacaccctctggatggtgtgactgaagattaaatacagcgggtgctctcactcagcacatctggccatgtctgcagacacatttggttgccacaactggaaggggggtgggggttagtgacatctagaggccagcgatgctgctgatgatcccacaatgcccaggacaagatcacaaagcatcatcctgttcaaaaggtcaacaggatcaaggttgagagaccctgaaataaggccatggggacaaaatgtcggctggatagga

SEQ ID NO: 741 - DNA, 499 bp, Homo sapiens
  source 1..499: mol_type = other DNA
agcgtggtggcgggtgcctgtaatcccagctactagggaggttgaggcaggagaatcacttaaacctggagacggaggttgcagtgagccgagatcacgccactgcacaccagcctgggcagcagagtgagactctgtctcaaaaaaaaaaaaaaaagtgagcaatatctgtggttaatctcaaatagggtggctttccgtgtcatttccctttagttgtttttaaatgcagatgttgctttaattaaataatatttgaaataagtggggtcccaactataaccttatatcttattgtttttaaatgttgatattttggtgttttcagtagaatttgagctgttaacagtgattaggttttttcagtttgtcatcgatgtatgtgacctcgttataatacacatggatttttgtctgctggttgtgttactcatgagcaatgtgttctaattatggtattttaacttataacttatgaaaaagttatgtttcactctag

SEQ ID NO: 742 - DNA, 499 bp, Homo sapiens
  source 1..499: mol_type = other DNA
tgggtggtgagggtgtctgtatatgtgtgtttacatttgtagacagtttctgtacatgtataattaggaatgggttgtcggttttggtttttttcccagctttatgtaattggtcagacttctcaaaggggggtagcacttgataatcgctctcttggaactctgaagcctttgcatggagcagtgttcaccctgggcagcctgtggcccctggggtcacagagctgctttccagggggtttgcaaggccgtcactgcctcataagattaccaagatctaatttacctctcactgtgtggacgtttgccctggtggtgcaaaggcaatggtgaggaatatggcgcctttctttcatcgagcaggacagcggtgttcagctagcaacacaccagtctgacccaagaatgtcctcgataaagcatgaagttactggttttttaagtctcaactcttttgtatacctttttaattttgtttttgtttgggtttgtttttagt

SEQ ID NO: 743 - DNA, 499 bp, Homo sapiens
  source 1..499: mol_type = other DNA
aggatccggcgtccggagcccgggatcacctgcctagcgggcttcacttggagaggtggggaggccagagcttgcggaagccgctccctctcccctgcaccttctccagggtcgccggctgaggcccaaggtccctaggggcagtgactagagaagaagggggccggccgtacctgttgccgctgacactcttgcagcgcccgcagggcagcgtcgttgagcctgagcagtaagaggctagtccgggcagcttgcgtgaagcagagccggagctgtcctctcagaggctcctggagctcctccatggcgacgagttcgagtgcaagcagcacgggggccacaggcgagggccaccaccgccacctcctctgttcagggtttggttggcacacccggtaacccacgtctgccccaccctccgccaggaacccgcccccggccccacctcccgccagcgccaccccaagctttcccagccgcgtgggcggcgcttcgctct

SEQ ID NO: 744 - DNA, 499 bp, Homo sapiens
  source 1..499: mol_type = other DNA
taattggggccctgcggttgtggtggcagcagtgaaagttggctgtcaccgactggagcgcccccagttggtgggcagggatacgggcgcgggtagtggcaggaaagttgcagggcagagagccagaacccagtcctaggtctcacctcgtggcctaaacacgcgtcagagtggtgagaccgctccctgaggagggccaggagctgccatgaagtcgccaggcattccagagggccagatcctggtgcactgagaccccagcaccaacctctggccagcccttggtgtctccacttgttcctgtttgattatgtttcccaagagccccgatgttgtcctgtttcctaaacaggatccctctgttaaatccctggacctgcacaatccccgggaaccttaacgtcctctactacaaataaaattacctatacatttgtcaaaactcataaaaaaaaaatacatttttttttttttttttgagacgaagtcttgctctgtc

SEQ ID NO: 745 - DNA, 499 bp, Homo sapiens
  source 1..499: mol_type = other DNA
gcccgctgctgtggcaagaatggcctggggtcagtgctagctgtggcagtggctgcaatacccctggctctaagggcatcttcagtatactgcaacaccctcaaattctggagtggtattaggggttactgagagccctctgggaattataaattattcctagagcaagaccaagccccactttggcttacagttgacctcgaaaactccaagaattcccccaaaagagaactcattcccaggaccctatcgaagaataatttgtccaagtttgcagtgggccattcagagaggccaaaggccttcttcctttgaccctccatcctgggattcacctgggcatctctaaaactatcattcctcggaagtagagagagacaaatgacatggctatgccaagctcaatctgagtgactggttgtttagcacaaggcttggcacaggcctccttcaactcttcccagggaacactaatgtgccagagctttctctttcatag

SEQ ID NO: 746 - DNA, 499 bp, Homo sapiens
  source 1..499: mol_type = other DNA
taagtgtagattcaacaaagacttaactttggtgaaaagatatgctctcataaggggaatgcattggagaattagagaccaatcagaaaggagagattatatttccaaaggcagaggttgctgggcataacccaagctttcttgataatcgttttacctttacaaggagctgataccaccagaaaagttttctccttcctctttaatacgtacacttgtttaacattagttgagatccagaaaagagtgaatgactaaacatttcaatccctgtagacacaaatggacttcacttcactattgactcttttgaacaagtggtctaagtgtggaggccacaagagaagatatttctatttcaaatcaaagactgtgaagggtggtagttgagcctaggggatcatcaatcctctctgtctcaccatgtgcataggtttatttatttaaactctcaaggtggctagaagtatctctgcttattgacctttaaacaagcttc

SEQ ID NO: 747 - DNA, 499 bp, Homo sapiens
  source 1..499: mol_type = other DNA
gtaatccagccctgccttatgggcagcagcccccaccccatactcctagctcctggcccatgttctgagggctgtgatgggccattccattcaacaaatggacttgacttctttggttccaatctccactttgctgctgcttcgctgtgtgactctgggcaagttaccatcccgctctggtctctagttcctcttctataaaatgaggctaagagcaatactccattagttatgtgaggattaaaggagagaatcctaggccaggcatggtggctcatgcctgtaatcccagcactttgggaggccgaggcgacctggggtcaggagttcgagaccagcctgacaaacatggagaaaccccatttctactaaaaatacaaaattagccaggtgtggtggtgcatgcctgtaatcccagctactctggaggctggggcaggagaattgcttgaacctgggaggcagaggttgcagtgagccaagatcgcaccattgcact

SEQ ID NO: 748 - DNA, 499 bp, Homo sapiens
  source 1..499: mol_type = other DNA
cgagaatctgcaggagatgccctggatggcagggactggagggtcccactgatggccacgccctctcgctccacccacaggctgtgaacaaccggtccatccaactccccaccaccgtgcgggacatcatgaaccgctggaccctgcagatgggcttcccggtcatcacggtggataccagcacggggaccctttcccaggagcacttcctccttgaccccgattccaatgttacccgcccctcagaattcaagtgagcagatggggtcactgaggcatggtcaggtgggtggggtagagggcagttactaagggaccatagtaggactggcctcctgtggtcccagccccagccactgtagacagaccctccctccagagccaggagttcaggggcactcggtgccagagctgggcagaagctgggagcctgggcagctgctcctcactggcagtgaccacaccgccatctctcaccacctctggatctttaattgca

SEQ ID NO: 749 - DNA, 499 bp, Homo sapiens
  source 1..499: mol_type = other DNA
atgaaaatgaaaatgacagatctgaggaagagggagagctctcttgaaacccctttcccagatttgccctcagttttaggaatgaggtacgcttgggcattcctgttgcctgcatggttcggcattctggcagccaggttcgccccagaatagataagtgtgtttgattttcgaacatttgactttattacctatttccagaaacacttcgtgttcaaactacgtctctacaggcatttctacttggtctttttctcccctgacatttcacagagtcctaactgtgctgcatgtataacttgttctttctttttgttacttgcatagcaagcatgtttctatgtcattaaatatcctttgtaagcagcattttatagatttttataatacttcaccaacagaagcaccataatttatttaagcatctctctattgttggacatgtagattgctttccattttttcctattatgagcggacagcttagtacaaaaagcct

SEQ ID NO: 750 - DNA, 499 bp, Homo sapiens
  source 1..499: mol_type = other DNA
cacttccttgcctcggctcccccagcctcccccacggtgaagcctgggcgttggaatggctgctgacgttcccaccggggaggagcagcggaggcgcaggggccggtccgacccagcgggaccccgggggggcgggggttgtggcttttccctccacttccaggtgaggcttggtatcaggcctccccagcatctggctgcctggagggggcaggtaacacaacccagaaggaaggtttacccaaggaaagacaggacataaagtgtatgcccttcctgtctgagggcacattggtctcacaaggcctgtttggaagacttcccccagctaagcaaccaccccgtttctttgtggagctgcagccagcttgaaacacagctccttccatttgtcaaccccgggcgcttcctcctgctgccctccactcctgttgccctgggattgcacctcccaataaagcttcagcccatgggcttcacttcagtcccttgttttcca

SEQ ID NO: 751 - DNA, 499 bp, Homo sapiens
  source 1..499: mol_type = other DNA
gttaactatggaaagaaaagaagaaagacaggcaagaaagagggaagaaaataggaagaaaatgaagaaggaagggagggaggaaataaaggaaagagaaaggaaaagaaggaggaaaggaagggaaaaagatgaatggaaggaaggaaatagggaacaaagaagaagggaggagagaggaaaatggagaatgaaataacggggaaaagaatgaaaaaaaggaggaaagaaaatgaaggagggaaggaagaaaacaggaaaggggaaagaaaggaaagaaagaggaaaggaaggagtgagcaaggaagaaaaaagaaaagaaagaagggaggaagaatggagagaaatggagagaggagaagggaaagaaagaagaaagtgagggaggagaaaaaagaggatgagagaaagagttatcaggcagggtgagagaaaggcatggcccaggaaagaagctaagtggaaaggctcttctttatctgtactgcgttctccccag

SEQ ID NO: 752 - DNA, 499 bp, Homo sapiens
  source 1..499: mol_type = other DNA
tagcagcctcccccaacttctggcaaggcctggcatggagaggagaaagacacacaggcctggttggcacgggctgctgggctgctgggagaggcccagggtgtagacactcacgtatgcacctctgtgatgatttccttaccagattgtggatgatgagggcaacgtcctgcctcctggagaagaggggaatgttgccgtccgtatcagacccactcggcccttctgtttcttcaattgctatttggtaagagacggggaacagccgttctcatgacagtgactgtgtgctaagcattgtgcaccacactttgtaaatatctatttgtttaatccttacaatgactgcatgaggtaggttgctactattattaataaagttctgttattgataaggaagactattattgataaggaagctactacaaaggggaagtgacttatccagcatcatgcaaatagtacaggcaggacatgggatttaaatgtgggtgtgtct

SEQ ID NO: 753 - DNA, 499 bp, Homo sapiens
  source 1..499: mol_type = other DNA
gctgtggatcagaggaccctgtgccagatcatacaactccttgcagttcatgtaaggactcggattttacctggagtggaaaaagaagcactgaaagatttgagcaggggagtaacctgatagcgtttatgtttagtcctgccacttcgacagataaacgcaccaatgggcttgatgagatttaggccaacccataaccgcccctcaacttctttcctttcaatttcaaaactcctctatggcttcctccatctgttcttccttctgagaagtgctctctctgcccctttacagaactaaccacttcggcaactccttggacactttccttcttgttaataatttgctttctccgcccctcaaaagcttgctgtttctgtaaatcattacctgtaagaggaaccgctgggagtcctgtaaactttagcccagagcttggctcctcctccagaatgtctccaccaatcaaggaaagtgttttgggccagtcttgctcctc

SEQ ID NO: 754 - DNA, 499 bp, Homo sapiens
  source 1..499: mol_type = other DNA
tgagtacctcatctcccctcctgtgtaagatttcctgaactggcacatctgttttttgagcaaagataacaaacagatgaacaaaaccaacaatcaaaaatgctgtcattaaagtcttgggcagccaaagtttctctcagaatttctcagttgtgtgatactatctattaagtgatgaggagtatgcacacacaaaaggctataaatgtagcagctgagttttcatgttgagccttttggtgctatttgattttttgaaaaactatgtacatgtattaagttgataaattttttttttaattttaattgaaccagatgcggtggctcaagcctgtaatcccaccactttaggaggctatggtgggcagatgcagatcacttgaggccaggagttcgagaccagcttggccaacatggtgaaaccctatctctactgaaaataaaaaattagccaggtgtggtggcaggtgcctgtaaccccagctacttgggagcctga

SEQ ID NO: 755 - DNA, 499 bp, Homo sapiens
  source 1..499: mol_type = other DNA
gtctgttttcattaccatggctattataataatcatagggtcctatgaaattacagaaataatgaggaagtatacagagatgttttaacagtaggaaaaaaattcagcctttaacaccaaaaaccagtgttcctggaggctgctgacctccaaggatgccaagtggcagtctactgacgatttgggggcaacactccaggtgagcattctaagtctagggttcagccgctcaattttatctcatcatctccagttaatcagattctgggaaagtgaccaaaaaacagagacccatttataatacagaattccaattaacaaatggattacagggaagcatgtctttccagtcatcagaatatttgagtcagttactaaaagcagattcagaacaaaagaaaatgcatgatatccatgtgagatatccacactccacagcaaagcactcctccagccaggtcaagcctgtcccactttggagagcagcagtgtcttaact

SEQ ID NO: 756 - DNA, 499 bp, Homo sapiens
  source 1..499: mol_type = other DNA
tataggcgcacgccaccatgccaggctaatttttgtattttttaagtagagacagggtttcaccatgttagccaggctggtctcgaactcctgaccttgtaatctgcccacctcggcctcccaaagtgctgggattacaggcgtgagccaccgcgcccggcccagaatcatacattttagtggatccacactagctgtgtgttccgagcaaggcatgtcttcttcacacgggtgctgttggcattctgggcagttctttgtcctgctgtactgtttcttacattgcagacgttcagcaatgctgtgctgcctccccttaacaccatcactgtgatacctcagaatcctccaatcaactccaaaccccagcagggggttgggcagtcccaccccagacagagaccgctgtgctgatgaccgtgggacgtcaatcttaccactcagctggcttcctcgtgatgtagcaggggttctgctacctatttaatgtgtcttggca

SEQ ID NO: 757 - DNA, 499 bp, Homo sapiens
  source 1..499: mol_type = other DNA
agggggctgggcgtgatggctcacacctgtaatctcaacactttgggaggctaaggcgggtggatcacttgagggtgggagtttgagatcagccagagcaacatggagaaacctcgtctctactaaaaatacaaaaaattagccaggcatggtgatatatgcctgtaatcccagctactcgggaggctgaggcaggagaattgcttgaacctcggaggtagaagttgtggtgagctgagatcatgccattgtactccagcctgggcaacaggagtgaaactctgtctcaaaaaaaacaaaaaacaaaaaagaacaccacgggaaaatcaagtgtgaagcaagagctcaactcttaacaggggcaatgtttggagttttgttactggaaaagatagagaccttaccaggtccaaagtttgtagacacaggaattacgaaatggagaagggggagaagtgagctagtggcagcataaaaagaccagcagatgccccacagc

SEQ ID NO: 758 - DNA, 499 bp, Homo sapiens
  source 1..499: mol_type = other DNA
tgggtccacagctttccctcctgcctttcctctggttctttatttcagtcttttttgcatacattggtacagatgcagaaatagaacaaagaaacagggcaaatgggctaaattatagtgaaccaaagggcttagtgtgttaaatcttctccttttctgcatccatagaagacagtgctgctgtctttcccaggagataagatttactctcaggagtgtctttttccttgaggttacgtttttgtctttgtagggtatgtcatcagctcccgtggtaggcttcctggcattcggaatatatttactagcagatattttcctctttaaaaatgtataataagaaagactaatagtaacacatttgaatgacacaattaattgactagtacttgggatacacactagtacctgggatacatctaattaagacacttagatcttaaaaaataaaaagactttttgaaatgttgaaataataagactagaaactttttttttt

SEQ ID NO: 759 - DNA, 499 bp, Homo sapiens
  source 1..499: mol_type = other DNA
tgtcccccaggctggagtgcagtggcttgatcttggctcatggcaacctctgcctcccgggttcaagcaattctcctgcctcagcctcccgagttgctgcgattacaagcgcccgtcaccacagaagcccagctcatttttgtatttttagtagagatgaggttttgccatgttggtcaggctggtcttgaactcctgacctcaggtgatctgcctgcctcggcctcccaaagtgctaggattacaggcgtgagcccccatgcccggccacactgctagaaactttaaaagcatctcattcggttacgtgtccgcctgcagtgggacaggtagtatgactccaccccactgtgaggaagtggaggagcagtggggtcagtcacacgcctggcaggatggccaggagccccattgtctgccttaggagcacctgctggccccacccccacttagcttcggggctttctgtcctcatgctcttcccttcccttttctgtag

SEQ ID NO: 760 - DNA, 499 bp, Homo sapiens
  source 1..499: mol_type = other DNA
taaggaggagggtgcgggcgagcccccgaggtcaggctgggcagggcgggtaaggaggaagcgtctggctggcagtggagctgagtcagagctgtcctgtgtcctgctcttttccagggcttcgggagcggggagagggttgaatatgagcccccagaccctctgtcctagaggaagttggggtggcccggggaatggggctctgctttgctgcccaagacctcgcattgcaaggagagtctgggtagagagcctgggatggcatgtgagcctcgctggcttccctggaaggggaaggaggagaagctggggtgtcacactgttaaagaaatgctgggtggagtggctcatgcctgtaatcccagcacgttgggaagctgaagtgggtggattgcttgagcccgggagtccgacaccagcctgtgcaacacattgaaactccgtccctacaaaaaatacaaaaattagccaggtgtggtgcatgctactggggaggttg

SEQ ID NO: 761 - DNA, 499 bp, Homo sapiens
  source 1..499: mol_type = other DNA
ctgtgctgctgacttgtctctggttttctgcagtgtggggagcccagggaggtggatgaatgaacagttagttacgccctgcccacctgctgggtgccaggccttcctgtccctgttgaatccactagttatctcgttcgatctttgcagcaaccctgtgagataggaaggtgttattatcttgctttgtctttcaaaaaaaaagcgaggctcagggaggccaagggaagtgtccaaagtcacacatcaagttactggcagttacagttccaaccaagagcttccaactccataccccctgctccttctgctagccatgaagggctttggccttatagggcttgtagggaaaggtgagtggccaagagcaagtccatgccaagggaagatctccaaacatgagtccctgtctgttgcctcccctgagataggcacaggacaagtgatcaatgagacagggtggtccttgccctaagaagcaaagtgtttggttggggag

SEQ ID NO: 762 - DNA, 499 bp, Homo sapiens
  source 1..499: mol_type = other DNA
ccatggactgcaaacttgactccaatccccagtaaaatatctacaacagggtagtgaagcgatggttagtgaccatgagggaagcttgcagagcaggcatcagaaagagcctgaggaggtccacagggaagctggcacgtccttgtaggatagttaaggcactggggtgagcaatgaacctggactcacggaacactgggctctgtgaccgtttccctgaatggcctaagctgttgcctcctgtcacttctctgaggtcattttccaaatgcgcacgggcatagagaacccatccactctgcctacttcccagggatgccttgagcactgaggatacctgggggacatgaagtcgcactgtcctgggggtcgggacaccccagccagggacagagcatggcacagggacatcgaggcccagtgagccgaccctttgtcctcctctctgagagcactagtccccagcaggcctcagggtgctgactctgtctcttttcca

SEQ ID NO: 763 - DNA, 499 bp, Homo sapiens
  source 1..499: mol_type = other DNA
gtgaggccacgcttcccacaggcaggaggaagcccttggaaggcctgctctgggaggctggatcaggcttattttatccattttttttttttttttgagatggagtctcgctctgtcgcccaagctggagtgcagtggcacgatctcggctcactgcaagctccgccttctgggttcacgccattctcctgcctcggcctcccaaagtgctgggattacaggcacgtgccaccatgcccggctaatttttttgtatttttagtagagacggggtttcaccgtcttagccaggctggtctggaactcctgacctcatgatccgcccacctccgcctcccaaagtggtgggattacaggcgtgaaccaccgcgtctggctgaacttcaaagtattttaatgccacagtagttaagccatatgatacaggggccagaatatatgtattgtttgcattacatcaggctctgttagtactttacagcatactgtgagtacgaac

SEQ ID NO: 764 - DNA, 499 bp, Homo sapiens
  source 1..499: mol_type = other DNA
tgtgtagtgtggtgtatatgtgtgtgttgtgtgtgtatgcatgtgtggtggtgtgtgtgagatgagtctgtgtgtgtgcggtatggtatatgtgtgtgtacgcatgtgatgtgtgtggtgtgtctcttggtgtgtttgtgtgtgtgtgatggatctgtgtgtggtgtggtctatgtgtggtgtacatgtctgtggtgtgtgtgtggtatggtgtgtggtgtggtctatgcatggtgtacgtgtctgtgggtgtatatgcttccccagccacaggctggagcctagcaggtggggaccacacctgccggcagcactttcagcctgtctgtcctagatcacgatgccctgctcttccatctgaagcacttccccgtggacctgcgcttcgtggcctgccagatggagctcctccacagcaacggtaggggtggggccgtctccaggcccagtgtgcctgcccctccggctggatctcatctccctgccccctgtcccctca

SEQ ID NO: 765 - DNA, 499 bp, Homo sapiens
  source 1..499: mol_type = other DNA
gtcaggcggccgcggtgggagggggacccgcccggctcccagctccgccccctggcctagcgggccgtgtaactgactagcgggcagagtcgcaggggcgcacagttagtggggaggacgggacttgggctttctgcttggggagcccccactttctcccccgtctaagagacgcggatgtgttcatggaagcgagtcccataccagggctcacaccctggaaggggctggttccgcgcgtggaacttcccaggggacctcagaagaagcggccctggctcctgcgttaacgtccggcccgcggacgacactgaacatatctcagggcctaggagacgaagccgaccaaaaccctttatagcatcattaaactttttagtcggcttggggacccccttcataatcatttccctcatttcttgagactggtgggggtggagggcccttaaaatacccgttctgggttggcgagtcctctccagagctcccgtgaaggctt

SEQ ID NO: 766 - DNA, 499 bp, Homo sapiens
  source 1..499: mol_type = other DNA
tgagccgtataagatgttaatataactgtcgtcactctagaaattaccataatgcttacagggatttgaaagttcctgagctttggaaggaaatgcataaatactaaacagaacacacacacacacacacacacacacacacacacacacacacacatctctttttctttctctttcttatttttgtaaaaacaatttttatccttttttttttgaggagtctcgctttgttgcccaggctggagtgcagtggcacaatctgggctcactgcaacctccgccgcccgggttcaagcaattctcctgcctcagcctcctgagtagctgggattacaggctcccgccaccacgcccgactaattttttcgtatttttagtagagatacggggtttcaccatgttggccaggctgctttcgaactcctgacctcaggtgatccgcccacctcggcctcccacagtgctgggattacaggcgtgagccactgcgcccagccct

SEQ ID NO: 767 - DNA, 499 bp, Homo sapiens
  source 1..499: mol_type = other DNA
tctgaattttcagagtgagaattgttgtcctgtccttgaagcaaatcaccttcaagtattacagtgtaatattcacattctctggtagatgagagacacaactttgtgtagtggatatttccaatcagacgctggctaagccttcaccttggcatttgccagctgtgtggccacaggcaagtcacttaacctttcatagctttagttttctcatctgtaaaatgaaaataatagtacacgtctaccttgctgtggttgtaaagttaaggaaggagcattcggtattgttatataacaggtggctctgcattattttatgtataatgtagcacgttattacatattaattagtgtattagtactgtatatacacagtagatactatggaggtacctgttttcattgttacatcactgtttttatttcaagtgatggatttgagttggtccgttgctgttttagttggtgtgtgatacacttttactttctttaaaaaaag

SEQ ID NO: 768 - DNA, 499 bp, Homo sapiens
  source 1..499: mol_type = other DNA
ggcatgcctcactgcacccagctaaatttttgtatttttggtacaaagatacaaaataccagccaggctggtcttgaactcccgacctcaggtgatctgcctgcctcggcctcccaaagtgatgggattacaggcatgagccactgcaatgccttaagcattattcttgaagataactttgattaaaaaatgataaaatcaattcaaccaataacatgacagaaataagcattacattacttgttaagagatggcaattattacattggttgtttgcatatttcgatttattttcttcctataggtatcctgcaccccatgtaacataccaattggaaccccagtgagcggctatgctctctaccagcgacacattaaagcaatgcatgagtcagcactcctggaggagcagcggcagagacaagaacagatagatttggaatgtagaagttctacaagtccatgtggcacatccaagagtccaaacagagagtgggaa

SEQ ID NO: 769 - DNA, 499 bp, Homo sapiens
  source 1..499: mol_type = other DNA
taaactgcctctcgggaggttgggcgcggcgaactactttcagcggcgcacggagacggcgtctacgtgaggggtgataagtgacgcaacactcgttgcataaatttgcgctccgccagcccggagcatttaggggcggttggctttgttgggtgagcttgtttgtgtccctgtgggtggacgtggttggtgattggcaggatcctggtatccgctaacaggtactggcccgcagccgtaacgaccttgggggggtgtgagaggggggaatgggtgaggtcaaggtggaggcttcttggggttgggtgggccgctgaggggagggcgtgggggaggggagggcgaggtgacgcggcgctgggcctttccgggacagtgggccttgttgacctgaggggggcgagggcggttggcgcgcgcgcgcgttgacggaaactaacggacgcctaaccgatcggcgattctgtcgagtttacttcgcggggaaggcggaaaagag

SEQ ID NO: 770 - DNA, 499 bp, Homo sapiens
  source 1..499: mol_type = other DNA
gtttgtgtggtttctggaagcctttactttggaatcccagtgtgagaaaggtgccccttcttgtgtttcaatgggatttttatttcgcgagtcttgtgggtttggttttgttttcagtttgcctaacaccgtgcttaggtttgaggcagattggagttcggtcgggggagtttgaatatccggaacagttagtggggaaagctgtggacgcttggtaagagagcgctctggattttccgctgttgacgttgaaaccttgaatgacgaatttcgtattaagtgacttagccttgtaaaattgaggggaggcttgcggaatattaacgtatttaaggcattttgaaggaatagttgctaattttgaagaatattaggtgtaaaagcaagaaatacaatgatcctgaggtgacacgcttatgttttacttttaaactaggtcaaaatgcagatcttcgtgaaaacccttaccggcaagaccatcacccttgaggtggagccc

SEQ ID NO: 771 - DNA, 499 bp, Homo sapiens
  source 1..499: mol_type = other DNA
cctgaggtcaggagttcaagaccagcctggctggccgacatggtgaaaccccatctctaccaaaaatacaaaaattagccgggtgtggtggcgtgtacttgtaatcccagctactttgggggctgagccaggagaatcgcttgaacccgggaggcggaggttgtagtgagtcgaaatcgtgccactgcactccagcctgggcaacagcgagactccatctcaaaaaaaaaaaaaaaattacaacctactgagaagctaattaagatttgtagtcctcaataatttacaaaaacttagaaaaattacctctaattaggtcttaaggggcttttgttaggatggacttaaatttgtaaagtcattaattgactgtcatcagaaatgcctgtcctgctctgcatctgcagtctctaaggtgtatgcgccttctccattcccccaggttttgagaacagagtgctgttttagagctggcagcagcatctcagcccaagagaag

SEQ ID NO: 772 - DNA, 499 bp, Homo sapiens
  source 1..499: mol_type = other DNA
aaaaaaagatatcaaatgatgaaatcacccaaaatagctggaattaccggcagattgtgtagtggtgaacctatggttttctgaagatatctcttaccctgtgattgactgtcagttggtgcagaaagtgagattgaaatgtagtttctttgcaggttatattcccagaggatgtcagtcccaaggaccagtagctgccatcagtttggattctgaaaactaactggcatcaacactgggtgtagaaacatgcttgccttatgtatcagaggacatgctcagcagatccaagagatatatttggcaactttttctagaaaaggcacattgggtatcattcattacattcttgagtttttttgggtttttttttttttttttgagacagtcttgctgtattgcccaggctggagtgtggtggcacaatcacagctcattgcatcctcaatcacccaggcctaagcaatcctcccaccttgtagctgggactacagctcac

SEQ ID NO: 773 - DNA, 499 bp, Homo sapiens
  source 1..499: mol_type = other DNA
gtaaggacagaaagtgtggggcttaaatagaaagtcaattttttcattcttgatttagtcaccataaacagaattattccatgtcatacacttcccatggctccctcacaatataaattcccatttattcataattgttaggaaaagttttaaatgaaaatccagattcaggaaccattttcacatttaaaaatacaaggctaggccgggcgtggtggctcacgcctgcaatcctagcactttgggaggccgaggctggtgaactgcctcagctcaggagttcaagaccagcctgggcaacatgctgaaacccagtctctactaaactacagaaaattaaccaggtgtggtagcacatgcctgtagtcccagctacttgggaggctgaggcatgagaattgcttgaacccgggaggcggagcttgcagtgagctaagatcacgccactgcactccagcctggcgatggagcaagactccatctcaaaaataaataaata

SEQ ID NO: 774 - DNA, 499 bp, Homo sapiens
  source 1..499: mol_type = other DNA
caaagttcctatggacaaagaaggccgaaaagtgagctgtgatccagaagcctgctggctgactaagcctttcttgtaaataggcagaagtcacagatttactctgatccttcaaatgcataatgaagagaaaaactagatagttagttgccctggatcaggaaagtctggcgggaaacctctgcactgcttacttacaaaccaagtgaaaaattacctgcctgattttcttttattaataaataaatatatttatcatattgttgaacggcatcctactaggagtgatctgtaaatatttaatgttagttaatgatctccttctcccatagtcctttgctcatgctgagtgtttggctgtatctcatctcaactccccttaatctgaggtttcctaggggcaatatcagaaccctggtttccatttgcagcaaaaacatgggtacctcggaaaaaatagagtccttttaactttgatttctcctctctttgatcagta

SEQ ID NO: 775 - DNA, 499 bp, Homo sapiens
  source 1..499: mol_type = other DNA
attcaccaacagttcagtgatacttgaattctggtcttctttcccaatcaggctgctcctattattcagagtcctcaaatacttgctctatgcattccgtccacctttaagtgacattcagtggagagacagagtgcagtacgtttgctccgctttatcctggaccggagacctcacagctttcttcttaacctgtgttctatactacttctcatcctttaagaaacgatggggtggtagctacactgatggaaagactaaaggctctggtcttagtgttccgtgcacactccacagtctcagggctcccaccacccatggcatcataacctgatgtgcactaaaaccaattgttttataaacagttattacaaaatgacactttatgcagtctgaaggtaccttttaggttttgtttttagactaggaaaattatcttactttttgcatttgtgttctcactgtagggtaatcattctgtgttatcacactatcctag

SEQ ID NO: 776 - DNA, 499 bp, Homo sapiens
  source 1..499: mol_type = other DNA
taagtaacaaaactcttttctagcagtgcatctagtcagcagattattgtagccagaaaagaactcatggtcattaattcccatgttctgctcagtattgtgttgatgcgcagcccctgttagcaagatggtaaggatcaaaatttttttggagtttgtatttgctatctccacttcctttccttgtattctctttgacttcagacatgctcttctaccactctatggacataactcttgtcaaggtcactggtgacttctgtattgtgaaatttagaactgcagttccatagtccctcattttatcagcaacaaatgacaaagttgatcacttcctccttcttgcacacatggctttcagacaccagtcactttggttcttctcctgcctcacgttcatttcttctccatctcttttggtggctcttcctcctctactgaccttttcttgttggagaccccagggatcaggcttcagacttttctatctacattcatt

SEQ ID NO: 777 - DNA, 499 bp, Homo sapiens
  source 1..499: mol_type = other DNA
gtaagttgatacatttattaccactttctctgctttagatcttagctatatgtagctaatattaatgccctagtaggttactgcaatcactactttcatgtccattgtgtgtgtgcatgtgtgtgtccttgtgtgtacttgaaatagtttctatggagtgaaaaagttatgtaatccaaataaaatttgacttgccttttgcataaaggtctgaactaatgaaatgatgtatcaaaaagaaaaaacaatgctgactctaaaatatcaaagtcttttctgtataattattgaggttatttttgaggggtggacccaattttttttcccttaagggtgctcatcacatggtagctgatcacaatatctcttctccctctaatattctgtctcatacttacttctcgtttcactccgctctgccttctctgaacaagaacctctaatttccatcttccaggttgttttctgcagaaagtatgtagatgctccttcttacatt

SEQ ID NO: 778 - DNA, 499 bp, Homo sapiens
  source 1..499: mol_type = other DNA
tctgccttctaggttcaagcgatttttctgcctcagcctcccgagtagctgggactacaggcatgcaccaccatgcctggctaatttttttgcatttttagtagagacgggtttcaccatgttggtcgggctggtctggaactcttgacctcaaatgatctgcccacctcagcctcccaaagtgctgaaattacaggcatgagccaccgtgcctggccttggcatcctttctattggttggtgcctataccagtgttcagcatctatcatctctgtatgcatatatggtaaaggtaacgaagatgaatggcaattataaagaaggagaattgcgattgaaaaaggatatgcaatgagcttctgctgtaggattaacagtatagttattaatctagaaggtacaagggtagtcattacattgttctttagatgcttttgtatatattaaatattttgtaaataagttaacataatttatataactttttgtctttattta

SEQ ID NO: 779 - DNA, 499 bp, Homo sapiens
  source 1..499: mol_type = other DNA
gcttgggaggctgaggcaggaggatcgcttgagcccaggaggtcgaggctacagtgatccatgatcgcaccattgcactccagcctgggcgacagagcgaggccctatcgcttagaaaacaaaaagttacatgaagttcccccaaggtcccgtagctagcatgtgatgtggcagggagagagcctgtccgcttcactctctcacatgggaccagaaaggggtgatgctgtgcgtggacaggacatctggcaagtggtgtgtccaggacacaggaagcagcgtagtggccaagctgcctccagctgtcacatctgtgtgtctctgcagtaaggatgagtctgccttcatggtccacccgctgacggcacagggagtggccgtggtaatagtggcttacggcatcgcccccaaaggtaataggagtggttgctgcaggtccgagggccggtgggctttaggaggaagtgcatccctgacccagctcatgctctctgtgcag

SEQ ID NO: 780 - DNA, 499 bp, Homo sapiens
  source 1..499: mol_type = other DNA
tgggtgttgccagtagattttcttcctgttggacctcagtgggtgggaggacagtgcaatcagtacctaggatacagccaagctgcccctctggcctgtggagcagaaagcaaattgggactcttcgaagggggcctgatgttgtggggaaactgcgtgcaaatccagctctctgctctgacccctcccaggggaatttacctgtgtggacactcagccggggcccacctggctgccatgatgctcctggccgactggaccaagcatggggtcacgcccaacctcagaggtttccatgggagctacagcctggctgggcaaccttcatctccccatgagccttggggtttgggccaactgcttgaaatcctcccggccatgagtggcttgaccgcagggcttcgagccctctgagcaaggccttctctgcctcctctgtgccccttcccctggtcctgcccctctggcggtgggggtgggctggccctgccttgctccg

SEQ ID NO: 781 - DNA, 499 bp, Homo sapiens
  source 1..499: mol_type = other DNA
aagaactgttgatcccaaaagggaaaaattagacatagggtgtgacgtgtctagatacctccacctgcgctcatgcacacattcctgcgccataaaggattgattttttttttttaaccttggtgttttgtgtttgagctgtgtgctaacagtcagtgtcaatgtctgccttctgagctgtgggcgattcccattgttgtgaggtttcctccaactggacgttaagttactgagaacaggaatcagggatgcgattggtgcgtgtcttctgtggctacctggtcagcattcataaacggtgataatggattgaatgctgcagtttcaaccttcctgacaacagaggagagtgttactttggggcatgaacagttattgatccagctgggccttggttaatgagtcatttggcttacagtgttcccgagtcacaggctgtcctgaagatcacctgctgactcattggtgcccttgtttccccgaggcctcctgcagtgac

SEQ ID NO: 782 - DNA, 499 bp, Homo sapiens
  source 1..499: mol_type = other DNA
tatgtgacatttagcatttctcaatgcctaagattaaactgatgctttgaatcctgatcatgcttttgagctgctcctcttgggtacttgtggcatcgtgttggcagaccctgagtgacatcttcagcggcgggaaaacgaaatgtatttcactgggagtaagtagagcggacatttgagagtttgctgggtcccagacagtgttatgtgaatgaaagtgttggaaatgtaatctggatcctcagggaatttctgaagtgtcgggagaggagatttgatgagcagaagcaattggagaacagcattctagggtatagaagcaaactatcaactgtatggtgaagagctcactgagaactgggctaatggagcggcttcgtgcattcactcagtagcgattgagagacttctgggccagggctgggcgcacacggggatgaaatatggtcccttccctttccacacctgtgtggtaacaaggggctagattagcaaacaa

SEQ ID NO: 783 - DNA, 499 bp, Homo sapiens
  source 1..499: mol_type = other DNA
gttcagtactgaagacctaaacatttgtcacaagggcagtaccatccactatttacacacatttaaaattattaatgtgaggtccaggtttgccagttataacaaacttgttttcttaaaagtgagttagtggtgccaggcgtggtggctcatgcctgtaatcccagcactttgggaggctgaggcaggtggattacttgagcccaggagctcaagacaagcctgggcaacatggtgaaactccatctctgcaaaaaatacaaaaattagtcaggcatggtggtgaatgcctgtcgtcccagctacttgggaggctgaggtgagaggatcacctgagcccaggaggttgaggctgcagtgagctgtgatcataccactgcactccagcctgggtgacagagtgagtgagaccgtgtctcaaaaaaaaaaaaaaaaaaaagagtgaattgagaatttacataaagctcatgattctcttgtgtttcatgattgatttgag

SEQ ID NO: 784 - DNA, 499 bp, Homo sapiens
  source 1..499: mol_type = other DNA
tgggttttctttccatcctgctgactttattacaactcatcctagttccagacgagagcaatgtagtgtgacaaagtccatgcactgttgaagaggccaccaggccctcagccacatgcctttccaccttcattcaccctcgtttttcagtcctctttactcagccaaaagtggtaactttcaaatgggaagaaagaggccagttcttctgatggcaggtgggaaactgttgggtctttgccatagtagaataagctgttcacttcacttcctggtccactaaaatgtccagagttgcactgagcactcaggcatggtggtaggtggttatcagacggggtgtcacagatggacaacaggaaccaaatgttactcccagagcagcactgtggggaatggattcaatcgttgggtgtttggaagacggtgctggtttttccttgaaagcacatctgcatccccatttttatttatttttttgaggtggggtctcgctctt

SEQ ID NO: 785 - DNA, 499 bp, Homo sapiens
  source 1..499: mol_type = other DNA
ctaatgtctgcctcccataagccgaccctgccctgatgtggggctctggaggcctttggctcgtgtcccatttgtgacttttccttacagagggagctgtggccacctgagaaggtaagtgatctcttcttcctgccagagggatggaggaggctggattcttgtatccgggatgggttttagatgaaaattttaggccaggcgcagtggctcatgcttgtaatcccagggcatgggaggctgaggtgggtagatcacttgaggtcaggagttcaaaaccagcctggccaacatggcgaaaccccatgtctacagaaatacaaaacttagccaggcatggtggcaggcgcctataattccagctgcttgggaggctgagggagaagaatcacttgaacccaggaggtggaggttgcagtgagcccaagatcacgccactgcactccagcctgggcaatagagtgagactttgtctcaaaaagaaacattttactctcag

SEQ ID NO: 786 - DNA, 499 bp, Homo sapiens
  source 1..499: mol_type = other DNA
taattggcagggggcttccagtgaagacactgaaccctgaagccgtggtctggggcagggtggtgggagaggtgggcgggggggggtggtcccggctctgaggtgtgtgcccctccccccttcctgtcccacccgcttctccacccctagcttcaagagatagaggaattcaaagagaggttacggaagcggcgggaggagaagctccttcgcgacgcccagcagaactcctgaggcctccaagtgggagtcctagcccctcccctgatgaaatatacatatactcagttccttgttattcatttaagtgttttattcttttatcagtttttgggggccgagtgagacccaggatgcctcaggccctcagggggcttgtgtcgggggctgggggctgctgttccgacggaagccgagagcggtcgggtcctgaggggtgagcaggggttggggactgagggtcccagctcgtttctgtgctccgtcctgtggatgaaga

SEQ ID NO: 787 - DNA, 499 bp, Homo sapiens
  source 1..499: mol_type = other DNA
gtgaggctgagtcctgttactatagcaacttcctaggcacactctgccccttaagtcagggaggggctgcagcggggtctggggcacaggcgaagagaagaaggatgtgaacccctggctggccctggaaacgcctcctgtacagccccgggctgtgcggcctggggaagagagaggggatcggtggcccagttcagacaagggaggatggtccacccggcagggggccagctcagagaggggtggtggagtggtccatcccagtgttggggttcagctcagactgtaggatgagccatcccagtgttggggtccagctcagaatgggggtcgttccagccagtgttggggtccagctcagagttgtgtcatttaggtaagcccagagcagggaatccaggctccactggaggaatcagccagcctcgagtagggggcccagcccaggctgggcattcctgccccagaattcccaggacagccagatttcaaaagggca

SEQ ID NO: 788 - DNA, 499 bp, Homo sapiens
  source 1..499: mol_type = other DNA
cagcggccccagggggcaggcgcccaggtcagacagccaagtggggctcaggtcgtggctggcactggctgaagatacccctgggagctggcccacaggggaaggggcagagctagtaaaagggagcccccgatccccaggacacaagcagatcctggcaaagagagaaaagcaccccccaagaagaccctagatgggaagaactagtgccgtgtaacatcctatggatgcctaagacggccaaacaccttctgtgccttggcagttgtatgggtgcccaagaggtcttatcaaggcagctctccccttagcgcaaccgcgtctacagaaactcggagggccctatctgtccctcctccacacccagtggcctctgggttgggtttctcttcctgctcccaccccacggctccctagctccccctgcaggcagggttctggggacagacagccgaacagacacggcaggtctcatgagccttcccagccaccgtagtgc

SEQ ID NO: 789 - DNA, 499 bp, Homo sapiens
  source 1..499: mol_type = other DNA
gtccgaggcagggtttctcggggcggggctggcgcggggccacggacgctttcagatcctagagggagtcaggctgaagaggcgggactttcctgtcgtaagagggcggaacttggagtcaggacttctcacgcgaaggcggggcttctcgattttcgagggggcggggctgactgggcctcctgatccccaaaaggggcggggcgggggcaagaggcggggcctctccttcccgggggcgtggtcacaagcgccggctccctccttgcagatggaagggcgagaacgtgtccacgcacgaggtggagggcgtgttgtcgcaggtggacttcttgcaacaggttaacgtgtatggcgtgtgcgtgccaggtgcggagggttctcattttaaacttccaacagctttgtgggtggaggggtcgttattctgattttacaggtggggaagtgctagggcccagagaggtttagagacttgctggctctcacagccagtgag

SEQ ID NO: 790 - DNA, 499 bp, Homo sapiens
  source 1..499: mol_type = other DNA
ttaccaccatctggggcctccgcctcagcttctcggctctgtccagctcccctgccttgatctcttgctctgatttactgggtctctgggtgtccatctgatttgttctcttgagctttctgtggaagacggcattccagccattggtcccttgtcctgtaccttctgttagtgtcttctcccagggccttgcaaggtcctggtcatatctattctcactgccatttgtctgtccgtcttccatcccttgttatccttttcctgtttctcatgggctccccataccgccttctctatacttctctctcattttctgtgtcgcttgtcgcagtctctcaaggtctctgaatgtctctctcatctctggatctccctgtctgtgtctttgggtctgtccttggcagggtgctgggtgatgaagagtccaccgttgttgaaaacctccagcagggggcttggctggtgggctccaggggttcttgttcctgctcctacccca

SEQ ID NO: 791 - DNA, 499 bp, Homo sapiens
  source 1..499: mol_type = other DNA
cacttgatgaggtctgcaccttctcagtgatgtccactcccacagtgtagttggcagctcctcactggagtttgagtcctctggtagggtccacgtctccttagtaaagtctatatcctctgtatctcttaggggaaatccatgtctcctcactagggtaagtgcccttcaaagccattcatgtcctattagcagggcccagggcccttcagtcagatctgagaacccccagcaacatctgtgctcccttagtggagtccatgtactgtcagtgaagtgtgtgtcccttcggtgcagtgaatatctcctttatgaaagtatctgaccccttggtggggtctatgtccaccccaagaggtctgtactccttcagtgggccctcagattcccgccctccttgggattgggcagactctcggtctcccatagagagattttttttcagcttagggtgtgcaaggtttacagtcagctgggcaaagtgcagggaagtagctgg

SEQ ID NO: 792 - DNA, 499 bp, Homo sapiens
  source 1..499: mol_type = other DNA
tgagagatggaggagggtcctgcctgacttctttctggggtggaggggctagagagaagctagaggtaattaagcccaggttgtggtggtggtggtgggggtttcccttggtggagtaaagagattgtgaaggaaagaagagaatgtgggccaggtgtggtggctcacgcctgtaatcctagcactttgggagcccaaggcgggcagatcacctgaggtcaggagttcaagaccagcctggacaacatggtgaaatcccatctctactaaaaatacaaaaattagctgggtgtggtggtgtgcacctgtaattccagctactcgggaggctgaggcaggagaattgcttgaatccaggaggcagaggttgcagtcagccgagattgtgccattgcactccagcctgggcgacagagcgagagactccatctcaaaacaaaaacaacaacaaaaaaagagaatgtgaatgatttttcctatttgcacagactttgatatt

SEQ ID NO: 793 - DNA, 499 bp, Homo sapiens
  source 1..499: mol_type = other DNA
ccaaggcagaaaatcgcttgagctcaggagttcaagaccagcctgggcaacgtggtaaaacctgtctccacaaaaaaatacaaaaattagccaggcatgatggcacatgcctgtagtctcagctacttcaggggctgagttgggaggatggcttcaggccaggcgacagaggttgcagtgagctgagattgtgccactgcactccagcctgggtgacaaggtgagatcctgtcccccacccccccgcaaaagaaaagaaaaatgtggattctcaagccgcttccccaaatctgctgaatgtgatcatgcgattgggtgccgcaggcactgggaagccagacacaccgaatcaggctggatgtgctgggacacagcagggcgccgggaaggggtggagagggctccctttgtggactggcctgaccagggaccagggcctggctttcccaggcacccggccatccccaagttcagtggcagactgtgcttctctccccag

SEQ ID NO: 794 - DNA, 499 bp, Homo sapiens
  source 1..499: mol_type = other DNA
taagaaggtccaagcctctggcctcccccgagcttggcgagggctgaatggaagacctcactgaccaatggccctggaccaggccatgggggctggtttagacgtacttgggcccaaagcccagggaggacaaatcatttgcccaggtcatggagctgttgtggggcacgctggggacaaagctccaagtccgttcggttgggcagaaaatggtcaactgcttgaccaagggttaaacagcaggggctaaacagagactccagcccctccctctgctccaccttgctcagtgccccacactgccctgcattccaccaaggtccgaaaggaaaccattcctcaggcgcctgcaagagaccaggcaggaaagctcagcgagggcgtgggccaggtgggaactgggcgagctcatgagcaccagccctggatggggaggcagcaacactgtcagactggcctgttaaaaaggagtatgtgaaatcttcagagtgtatcatct

SEQ ID NO: 795 - DNA, 499 bp, Homo sapiens
  source 1..499: mol_type = other DNA
aatccctccatgccaaggtaagcaggagcctgggcagcagggagcccgagggggcaggaggagagctaacgacaagggctctcctagtggagccagtggatagctgtttggccagataaagtgtttcttcttgctaatacctgaaggcctgctgaatcttaagagtggaaggggccttaggtaagggtttgctacttcagcccttccgtagactaattctgtgttgttctgtaggtaggtcttttggtacaaggaagtgtgttgtgactcagtgtaagggttaagatttttccagctgtccagcaatgtacctctgtgtcaaaggtgacagacagggccatgggatcttgcaagcagtggtggatgggagggttccacagaaaccctgtggatggaggaggatcctgtatccaggatggtgagcgagggggagatcaaggctcttctgtgacctgctaagatagctgcactaagcccccccgccactcatgtctcacag

SEQ ID NO: 796 - DNA, 499 bp, Homo sapiens
  source 1..499: mol_type = other DNA
tgggtggaatggtgacagaagcagctgagcccgggagaagctgtaaggaaataggcagggactgactttcacaaacactgagaattgcgccgtgttcctggctttctctgaagcaccaaagagtttggaggaagttgtgagaatcagaggagatgattaactgtgatcggaatggggggtggtggagggtgaaggaggtgccctcttgccagctgccctgcctggcttcatgcagaatagtttgggctttcccagggccctgcctggctccattctgcctgcctgaaggcctggccaggatgtaaccaccttctttattgaagactgggtgtctgccatactttaaaaacacttatttttacctttttgtcctcagaaaaggaaatcctcgcttccatggctgccaaaaggacagtgtttctggctctcagccctaaggccctgcaaactctaacttatttcccaattagtctgtatctatacttgggctctgtatgtg

SEQ ID NO: 797 - DNA, 499 bp, Homo sapiens
  source 1..499: mol_type = other DNA
gtatgcttgcaggttttgctgtttcctttcaaataccatatgtagtactatttaatatttttcttgtaatcaactgactcttttgcttacatttattttaaaggaaacttttaccattattataaatgggaagttagtatattacttaccctaaataagttattcttaaacataaatacgtgactgtaaaacgaagtgttcaatcacataccaccgaaagtcctctaacataccactaccaactctgtccttcagttgcttggaccaaaaacctgggagctgtagttgactcttgtctctcacacctcacaggcaacctgatagcaaatctccacagctcagacctctgaaatgcctagaattacgccactcctcactactttcctgctatcaccctggtccaaacgggtattatcttttgctaggattattgcagtagcctcctagctgcttctgcccttgctcccttcactctcatcctcacacagcagtctgaggg

SEQ ID NO: 798 - DNA, 499 bp, Homo sapiens
  source 1..499: mol_type = other DNA
aacagctgttaacatcttgttctgtatccttaccaactctataaagctccttaagatgtcacttatcatctatatgagtttgctagtgctgtcataacaaaataccatagactgggtggggcttaaacaacaaatttctcacagctctagagaccagaagcccaagatcaaggtgtcagcaggttttgtcacattctgaggtactgggagttaggacttaagtatataaatttgaggggaacacagttcagcccagcccatagcacgatctgtgaacaagtacctcagtcatcagccttcctatcaatatgattcttttgatgttcatttttattagtgcaggcttgtaaattaaccagtagtaatgtagtgacttttcccccgctagcctaattaggattattaaagatttagattgaaccctttctgaacaatagttgtgttgtctggctttttgcctataatgtcaccactatctttcagttttatgtttgctaca

SEQ ID NO: 799 - DNA, 499 bp, Homo sapiens; identical to SEQ ID NO: 493
  source 1..499: mol_type = other DNA

SEQ ID NO: 800 - DNA, 499 bp, Homo sapiens; identical to SEQ ID NO: 494
  source 1..499: mol_type = other DNA

SEQ ID NO: 801 - DNA, 499 bp, Homo sapiens; identical to SEQ ID NO: 495
  source 1..499: mol_type = other DNA

SEQ ID NO: 802 - DNA, 499 bp, Homo sapiens; identical to SEQ ID NO: 496
  source 1..499: mol_type = other DNA

SEQ ID NO: 803 - DNA, 499 bp, Homo sapiens; identical to SEQ ID NO: 497
  source 1..499: mol_type = other DNA

SEQ ID NO: 804 - DNA, 499 bp, Homo sapiens; identical to SEQ ID NO: 498
  source 1..499: mol_type = other DNA

SEQ ID NO: 805 - DNA, 499 bp, Homo sapiens; identical to SEQ ID NO: 499
  source 1..499: mol_type = other DNA

SEQ ID NO: 806 - DNA, 499 bp, Homo sapiens; identical to SEQ ID NO: 500
  source 1..499: mol_type = other DNA

SEQ ID NO: 807 - DNA, 499 bp, Homo sapiens; identical to SEQ ID NO: 501
  source 1..499: mol_type = other DNA

SEQ ID NO: 808 - DNA, 499 bp, Homo sapiens; identical to SEQ ID NO: 502
  source 1..499: mol_type = other DNA

SEQ ID NO: 809 - DNA, 499 bp, Homo sapiens; identical to SEQ ID NO: 503
  source 1..499: mol_type = other DNA

SEQ ID NO: 810 - DNA, 499 bp, Homo sapiens; identical to SEQ ID NO: 504
  source 1..499: mol_type = other DNA

SEQ ID NO: 811 - DNA, 499 bp, Homo sapiens; identical to SEQ ID NO: 505
  source 1..499: mol_type = other DNA

SEQ ID NO: 812 - DNA, 499 bp, Homo sapiens; identical to SEQ ID NO: 506
  source 1..499: mol_type = other DNA

SEQ ID NO: 813 - DNA, 499 bp, Homo sapiens; identical to SEQ ID NO: 507
  source 1..499: mol_type = other DNA

SEQ ID NO: 814 - DNA, 499 bp, Homo sapiens; identical to SEQ ID NO: 508
  source 1..499: mol_type = other DNA

SEQ ID NO: 815 - DNA, 499 bp, Homo sapiens; identical to SEQ ID NO: 509
  source 1..499: mol_type = other DNA

SEQ ID NO: 816 - DNA, 499 bp, Homo sapiens; identical to SEQ ID NO: 510
  source 1..499: mol_type = other DNA

SEQ ID NO: 817 - DNA, 499 bp, Homo sapiens; identical to SEQ ID NO: 511
  source 1..499: mol_type = other DNA

SEQ ID NO: 818 - DNA, 499 bp, Homo sapiens; identical to SEQ ID NO: 512
  source 1..499: mol_type = other DNA

SEQ ID NO: 819 - DNA, 499 bp, Homo sapiens; identical to SEQ ID NO: 513
  source 1..499: mol_type = other DNA

SEQ ID NO: 820 - DNA, 499 bp, Homo sapiens; identical to SEQ ID NO: 514
  source 1..499: mol_type = other DNA

SEQ ID NO: 821 - DNA, 499 bp, Homo sapiens; identical to SEQ ID NO: 515
  source 1..499: mol_type = other DNA

SEQ ID NO: 822 - DNA, 499 bp, Homo sapiens; identical to SEQ ID NO: 516
  source 1..499: mol_type = other DNA

SEQ ID NO: 823 - DNA, 499 bp, Homo sapiens; identical to SEQ ID NO: 517
  source 1..499: mol_type = other DNA

SEQ ID NO: 824 - DNA, 499 bp, Homo sapiens; identical to SEQ ID NO: 518
  source 1..499: mol_type = other DNA

SEQ ID NO: 825 - DNA, 499 bp, Homo sapiens; identical to SEQ ID NO: 519
  source 1..499: mol_type = other DNA

SEQ ID NO: 826 - DNA, 499 bp, Homo sapiens; identical to SEQ ID NO: 520
  source 1..499: mol_type = other DNA

SEQ ID NO: 827 - DNA, 499 bp, Homo sapiens; identical to SEQ ID NO: 521
  source 1..499: mol_type = other DNA

SEQ ID NO: 828 - DNA, 499 bp, Homo sapiens; identical to SEQ ID NO: 522
  source 1..499: mol_type = other DNA

SEQ ID NO: 829 - DNA, 499 bp, Homo sapiens; identical to SEQ ID NO: 523
  source 1..499: mol_type = other DNA

SEQ ID NO: 830 - DNA, 499 bp, Homo sapiens; identical to SEQ ID NO: 524
  source 1..499: mol_type = other DNA

SEQ ID NO: 831 - DNA, 499 bp, Homo sapiens; identical to SEQ ID NO: 525
  source 1..499: mol_type = other DNA

SEQ ID NO: 832 - DNA, 499 bp, Homo sapiens; identical to SEQ ID NO: 526
  source 1..499: mol_type = other DNA

SEQ ID NO: 833 - DNA, 499 bp, Homo sapiens; identical to SEQ ID NO: 527
  source 1..499: mol_type = other DNA

SEQ ID NO: 834 - DNA, 499 bp, Homo sapiens; identical to SEQ ID NO: 528
  source 1..499: mol_type = other DNA

SEQ ID NO: 835 - DNA, 499 bp, Homo sapiens; identical to SEQ ID NO: 529
  source 1..499: mol_type = other DNA

SEQ ID NO: 836 - DNA, 499 bp, Homo sapiens; identical to SEQ ID NO: 530
  source 1..499: mol_type = other DNA

SEQ ID NO: 837 - DNA, 499 bp, Homo sapiens; identical to SEQ ID NO: 531
  source 1..499: mol_type = other DNA

SEQ ID NO: 838 - DNA, 499 bp, Homo sapiens; identical to SEQ ID NO: 532
  source 1..499: mol_type = other DNA

SEQ ID NO: 839 - DNA, 499 bp, Homo sapiens; identical to SEQ ID NO: 533
  source 1..499: mol_type = other DNA

SEQ ID NO: 840 - DNA, 499 bp, Homo sapiens; identical to SEQ ID NO: 534
  source 1..499: mol_type = other DNA

SEQ ID NO: 841 - DNA, 499 bp, Homo sapiens; identical to SEQ ID NO: 535
  source 1..499: mol_type = other DNA

SEQ ID NO: 842 - DNA, 499 bp, Homo sapiens; identical to SEQ ID NO: 536
  source 1..499: mol_type = other DNA

SEQ ID NO: 843 - DNA, 499 bp, Homo sapiens; identical to SEQ ID NO: 537
  source 1..499: mol_type = other DNA

SEQ ID NO: 844 - DNA, 499 bp, Homo sapiens; identical to SEQ ID NO: 538
  source 1..499: mol_type = other DNA

SEQ ID NO: 845 - DNA, 499 bp, Homo sapiens; identical to SEQ ID NO: 539
  source 1..499: mol_type = other DNA

SEQ ID NO: 846 - DNA, 499 bp, Homo sapiens; identical to SEQ ID NO: 540
  source 1..499: mol_type = other DNA

SEQ ID NO: 847 - DNA, 499 bp, Homo sapiens; identical to SEQ ID NO: 541
  source 1..499: mol_type = other DNA

SEQ ID NO: 848 - DNA, 499 bp, Homo sapiens; identical to SEQ ID NO: 542
  source 1..499: mol_type = other DNA

SEQ ID NO: 849 - DNA, 499 bp, Homo sapiens; identical to SEQ ID NO: 543
  source 1..499: mol_type = other DNA

SEQ ID NO: 850 - DNA, 499 bp, Homo sapiens; identical to SEQ ID NO: 544
  source 1..499: mol_type = other DNA

SEQ ID NO: 851 - DNA, 499 bp, Homo sapiens; identical to SEQ ID NO: 545
  source 1..499: mol_type = other DNA

SEQ ID NO: 852 - DNA, 499 bp, Homo sapiens; identical to SEQ ID NO: 546
  source 1..499: mol_type = other DNA

SEQ ID NO: 853 - DNA, 499 bp, Homo sapiens; identical to SEQ ID NO: 547
  source 1..499: mol_type = other DNA

SEQ ID NO: 854 - DNA, 499 bp, Homo sapiens; identical to SEQ ID NO: 548
  source 1..499: mol_type = other DNA

SEQ ID NO: 855 - DNA, 499 bp, Homo sapiens; identical to SEQ ID NO: 549
  source 1..499: mol_type = other DNA

SEQ ID NO: 856 - DNA, 499 bp, Homo sapiens; identical to SEQ ID NO: 550
  source 1..499: mol_type = other DNA

SEQ ID NO: 857 - DNA, 499 bp, Homo sapiens; identical to SEQ ID NO: 551
  source 1..499: mol_type = other DNA

SEQ ID NO: 858 - DNA, 499 bp, Homo sapiens; identical to SEQ ID NO: 552
  source 1..499: mol_type = other DNA

SEQ ID NO: 859 - DNA, 499 bp, Homo sapiens; identical to SEQ ID NO: 553
  source 1..499: mol_type = other DNA

SEQ ID NO: 860 - DNA, 499 bp, Homo sapiens; identical to SEQ ID NO: 554
  source 1..499: mol_type = other DNA

SEQ ID NO: 861 - DNA, 499 bp, Homo sapiens; identical to SEQ ID NO: 555
  source 1..499: mol_type = other DNA

SEQ ID NO: 862 - DNA, 499 bp, Homo sapiens; identical to SEQ ID NO: 556
  source 1..499: mol_type = other DNA

SEQ ID NO: 863 - DNA, 499 bp, Homo sapiens; identical to SEQ ID NO: 557
  source 1..499: mol_type = other DNA

SEQ ID NO: 864 - DNA, 499 bp, Homo sapiens; identical to SEQ ID NO: 558
  source 1..499: mol_type = other DNA

SEQ ID NO: 865 - DNA, 499 bp, Homo sapiens; identical to SEQ ID NO: 559
  source 1..499: mol_type = other DNA

SEQ ID NO: 866 - DNA, 499 bp, Homo sapiens; identical to SEQ ID NO: 560
  source 1..499: mol_type = other DNA

SEQ ID NO: 867 - DNA, 499 bp, Homo sapiens; identical to SEQ ID NO: 561
  source 1..499: mol_type = other DNA

SEQ ID NO: 868 - DNA, 499 bp, Homo sapiens; identical to SEQ ID NO: 562
  source 1..499: mol_type = other DNA

SEQ ID NO: 869 - DNA, 499 bp, Homo sapiens; identical to SEQ ID NO: 563
  source 1..499: mol_type = other DNA

SEQ ID NO: 870 - DNA, 499 bp, Homo sapiens; identical to SEQ ID NO: 564
  source 1..499: mol_type = other DNA

SEQ ID NO: 871 - DNA, 499 bp, Homo sapiens; identical to SEQ ID NO: 565
  source 1..499: mol_type = other DNA

SEQ ID NO: 872 - DNA, 499 bp, Homo sapiens; identical to SEQ ID NO: 566
  source 1..499: mol_type = other DNA

SEQ ID NO: 873 - DNA, 499 bp, Homo sapiens; identical to SEQ ID NO: 567
  source 1..499: mol_type = other DNA

SEQ ID NO: 874 - DNA, 499 bp, Homo sapiens; identical to SEQ ID NO: 568
  source 1..499: mol_type = other DNA

SEQ ID NO: 875 - DNA, 499 bp, Homo sapiens; identical to SEQ ID NO: 569
  source 1..499: mol_type = other DNA

SEQ ID NO: 876 - DNA, 499 bp, Homo sapiens; identical to SEQ ID NO: 570
  source 1..499: mol_type = other DNA

SEQ ID NO: 877 - DNA, 499 bp, Homo sapiens; identical to SEQ ID NO: 571
  source 1..499: mol_type = other DNA

SEQ ID NO: 878 - DNA, 499 bp, Homo sapiens; identical to SEQ ID NO: 572
  source 1..499: mol_type = other DNA

SEQ ID NO: 879 - DNA, 499 bp, Homo sapiens; identical to SEQ ID NO: 573
  source 1..499: mol_type = other DNA

SEQ ID NO: 880 - DNA, 499 bp, Homo sapiens; identical to SEQ ID NO: 574
  source 1..499: mol_type = other DNA

SEQ ID NO: 881 - DNA, 499 bp, Homo sapiens; identical to SEQ ID NO: 575
  source 1..499: mol_type = other DNA

SEQ ID NO: 882 - DNA, 499 bp, Homo sapiens; identical to SEQ ID NO: 576
  source 1..499: mol_type = other DNA

SEQ ID NO: 883 - DNA, 499 bp, Homo sapiens; identical to SEQ ID NO: 577
  source 1..499: mol_type = other DNA

SEQ ID NO: 884 - DNA, 499 bp, Homo sapiens; identical to SEQ ID NO: 578
  source 1..499: mol_type = other DNA

SEQ ID NO: 885 - DNA, 499 bp, Homo sapiens; identical to SEQ ID NO: 579
  source 1..499: mol_type = other DNA

SEQ ID NO: 886 - DNA, 499 bp, Homo sapiens; identical to SEQ ID NO: 580
  source 1..499: mol_type = other DNA

SEQ ID NO: 887 - DNA, 499 bp, Homo sapiens; identical to SEQ ID NO: 581
  source 1..499: mol_type = other DNA

SEQ ID NO: 888 - DNA, 499 bp, Homo sapiens; identical to SEQ ID NO: 582
  source 1..499: mol_type = other DNA

SEQ ID NO: 889 - DNA, 499 bp, Homo sapiens; identical to SEQ ID NO: 583
  source 1..499: mol_type = other DNA

SEQ ID NO: 890 - DNA, 499 bp, Homo sapiens; identical to SEQ ID NO: 584
  source 1..499: mol_type = other DNA

SEQ ID NO: 891 - DNA, 499 bp, Homo sapiens; identical to SEQ ID NO: 585
  source 1..499: mol_type = other DNA

SEQ ID NO: 892 - DNA, 499 bp, Homo sapiens; identical to SEQ ID NO: 586
  source 1..499: mol_type = other DNA

SEQ ID NO: 893 - DNA, 499 bp, Homo sapiens; identical to SEQ ID NO: 587
  source 1..499: mol_type = other DNA

SEQ ID NO: 894 - DNA, 499 bp, Homo sapiens; identical to SEQ ID NO: 588
  source 1..499: mol_type = other DNA

SEQ ID NO: 895 - DNA, 499 bp, Homo sapiens; identical to SEQ ID NO: 589
  source 1..499: mol_type = other DNA

SEQ ID NO: 896 - DNA, 499 bp, Homo sapiens; identical to SEQ ID NO: 590
  source 1..499: mol_type = other DNA

SEQ ID NO: 897 - DNA, 499 bp, Homo sapiens; identical to SEQ ID NO: 591
  source 1..499: mol_type = other DNA

SEQ ID NO: 898 - DNA, 499 bp, Homo sapiens; identical to SEQ ID NO: 592
  source 1..499: mol_type = other DNA

SEQ ID NO: 899 - DNA, 499 bp, Homo sapiens; identical to SEQ ID NO: 593
  source 1..499: mol_type = other DNA

SEQ ID NO: 900 - DNA, 499 bp, Homo sapiens; identical to SEQ ID NO: 594
  source 1..499: mol_type = other DNA

SEQ ID NO: 901 - DNA, 499 bp, Homo sapiens; identical to SEQ ID NO: 595
  source 1..499: mol_type = other DNA

SEQ ID NO: 902 - DNA, 499 bp, Homo sapiens; identical to SEQ ID NO: 596
  source 1..499: mol_type = other DNA

SEQ ID NO: 903 - DNA, 499 bp, Homo sapiens; identical to SEQ ID NO: 597
  source 1..499: mol_type = other DNA

SEQ ID NO: 904 - DNA, 499 bp, Homo sapiens; identical to SEQ ID NO: 598
  source 1..499: mol_type = other DNA

SEQ ID NO: 905 - DNA, 499 bp, Homo sapiens; identical to SEQ ID NO: 599
  source 1..499: mol_type = other DNA

SEQ ID NO: 906 - DNA, 499 bp, Homo sapiens; identical to SEQ ID NO: 600
  source 1..499: mol_type = other DNA

SEQ ID NO: 907 - DNA, 499 bp, Homo sapiens; identical to SEQ ID NO: 601
  source 1..499: mol_type = other DNA

SEQ ID NO: 908 - DNA, 499 bp, Homo sapiens; identical to SEQ ID NO: 602
  source 1..499: mol_type = other DNA

SEQ ID NO: 909 - DNA, 499 bp, Homo sapiens; identical to SEQ ID NO: 603
  source 1..499: mol_type = other DNA

SEQ ID NO: 910 - DNA, 499 bp, Homo sapiens; identical to SEQ ID NO: 604
  source 1..499: mol_type = other DNA

SEQ ID NO: 911 - DNA, 499 bp, Homo sapiens; identical to SEQ ID NO: 605
  source 1..499: mol_type = other DNA

SEQ ID NO: 912 - DNA, 499 bp, Homo sapiens; identical to SEQ ID NO: 606
  source 1..499: mol_type = other DNA

SEQ ID NO: 913 - DNA, 499 bp, Homo sapiens; identical to SEQ ID NO: 607
  source 1..499: mol_type = other DNA

SEQ ID NO: 914 - DNA, 499 bp, Homo sapiens; identical to SEQ ID NO: 608
  source 1..499: mol_type = other DNA

SEQ ID NO: 915 - DNA, 499 bp, Homo sapiens; identical to SEQ ID NO: 609
  source 1..499: mol_type = other DNA

SEQ ID NO: 916 - DNA, 499 bp, Homo sapiens; identical to SEQ ID NO: 610
  source 1..499: mol_type = other DNA

SEQ ID NO: 917 - DNA, 499 bp, Homo sapiens; identical to SEQ ID NO: 611
  source 1..499: mol_type = other DNA

SEQ ID NO: 918 - DNA, 499 bp, Homo sapiens; identical to SEQ ID NO: 612
  source 1..499: mol_type = other DNA

SEQ ID NO: 919 - DNA, 499 bp, Homo sapiens; identical to SEQ ID NO: 613
  source 1..499: mol_type = other DNA

SEQ ID NO: 920 - DNA, 499 bp, Homo sapiens; identical to SEQ ID NO: 614
  source 1..499: mol_type = other DNA

SEQ ID NO: 921 - DNA, 499 bp, Homo sapiens; identical to SEQ ID NO: 615
  source 1..499: mol_type = other DNA

SEQ ID NO: 922 - DNA, 499 bp, Homo sapiens; identical to SEQ ID NO: 616
  source 1..499: mol_type = other DNA

SEQ ID NO: 923 - DNA, 499 bp, Homo sapiens; identical to SEQ ID NO: 617
  source 1..499: mol_type = other DNA

SEQ ID NO: 924 - DNA, 499 bp, Homo sapiens; identical to SEQ ID NO: 618
  source 1..499: mol_type = other DNA

SEQ ID NO: 925 - DNA, 499 bp, Homo sapiens; identical to SEQ ID NO: 619
  source 1..499: mol_type = other DNA

SEQ ID NO: 926 - DNA, 499 bp, Homo sapiens; identical to SEQ ID NO: 620
  source 1..499: mol_type = other DNA

SEQ ID NO: 927 - DNA, 499 bp, Homo sapiens; identical to SEQ ID NO: 621
  source 1..499: mol_type = other DNA

SEQ ID NO: 928 - DNA, 499 bp, Homo sapiens; identical to SEQ ID NO: 622
  source 1..499: mol_type = other DNA

SEQ ID NO: 929 - DNA, 499 bp, Homo sapiens; identical to SEQ ID NO: 623
  source 1..499: mol_type = other DNA

SEQ ID NO: 930 - DNA, 499 bp, Homo sapiens; identical to SEQ ID NO: 624
  source 1..499: mol_type = other DNA

SEQ ID NO: 931 - DNA, 499 bp, Homo sapiens; identical to SEQ ID NO: 625
  source 1..499: mol_type = other DNA

SEQ ID NO: 932 - DNA, 499 bp, Homo sapiens; identical to SEQ ID NO: 626
  source 1..499: mol_type = other DNA

SEQ ID NO: 933 - DNA, 499 bp, Homo sapiens; identical to SEQ ID NO: 627
  source 1..499: mol_type = other DNA

SEQ ID NO: 934 - DNA, 499 bp, Homo sapiens; identical to SEQ ID NO: 628
  source 1..499: mol_type = other DNA

SEQ ID NO: 935 - DNA, 499 bp, Homo sapiens; identical to SEQ ID NO: 629
  source 1..499: mol_type = other DNA

SEQ ID NO: 936 - DNA, 499 bp, Homo sapiens; identical to SEQ ID NO: 630
  source 1..499: mol_type = other DNA

SEQ ID NO: 937 - DNA, 499 bp, Homo sapiens; identical to SEQ ID NO: 631
  source 1..499: mol_type = other DNA

SEQ ID NO: 938 - DNA, 499 bp, Homo sapiens; identical to SEQ ID NO: 632
  source 1..499: mol_type = other DNA

SEQ ID NO: 939 - DNA, 499 bp, Homo sapiens; identical to SEQ ID NO: 633
  source 1..499: mol_type = other DNA

SEQ ID NO: 940 - DNA, 499 bp, Homo sapiens; identical to SEQ ID NO: 634
  source 1..499: mol_type = other DNA

SEQ ID NO: 941 - DNA, 499 bp, Homo sapiens; identical to SEQ ID NO: 635
  source 1..499: mol_type = other DNA

SEQ ID NO: 942 - DNA, 499 bp, Homo sapiens; identical to SEQ ID NO: 636
  source 1..499: mol_type = other DNA

SEQ ID NO: 943 - DNA, 499 bp, Homo sapiens; identical to SEQ ID NO: 637
  source 1..499: mol_type = other DNA

SEQ ID NO: 944 - DNA, 499 bp, Homo sapiens; identical to SEQ ID NO: 638
  source 1..499: mol_type = other DNA

SEQ ID NO: 945 - DNA, 499 bp, Homo sapiens; identical to SEQ ID NO: 639
  source 1..499: mol_type = other DNA

SEQ ID NO: 946 - DNA, 499 bp, Homo sapiens; identical to SEQ ID NO: 640
  source 1..499: mol_type = other DNA

SEQ ID NO: 947 - DNA, 499 bp, Homo sapiens; identical to SEQ ID NO: 641
  source 1..499: mol_type = other DNA

SEQ ID NO: 948 - DNA, 499 bp, Homo sapiens; identical to SEQ ID NO: 642
  source 1..499: mol_type = other DNA

SEQ ID NO: 949 - DNA, 499 bp, Homo sapiens; identical to SEQ ID NO: 643
  source 1..499: mol_type = other DNA

SEQ ID NO: 950 - DNA, 499 bp, Homo sapiens; identical to SEQ ID NO: 644
  source 1..499: mol_type = other DNA

SEQ ID NO: 951 - DNA, 499 bp, Homo sapiens; identical to SEQ ID NO: 645
  source 1..499: mol_type = other DNA

SEQ ID NO: 952 - DNA, 499 bp, Homo sapiens; identical to SEQ ID NO: 646
  source 1..499: mol_type = other DNA

SEQ ID NO: 953 - DNA, 499 bp, Homo sapiens; identical to SEQ ID NO: 647
  source 1..499: mol_type = other DNA

SEQ ID NO: 954 - DNA, 499 bp, Homo sapiens; identical to SEQ ID NO: 648
  source 1..499: mol_type = other DNA

SEQ ID NO: 955 - DNA, 499 bp, Homo sapiens; identical to SEQ ID NO: 649
  source 1..499: mol_type = other DNA

SEQ ID NO: 956 - DNA, 499 bp, Homo sapiens; identical to SEQ ID NO: 650
  source 1..499: mol_type = other DNA

SEQ ID NO: 957 - DNA, 499 bp, Homo sapiens; identical to SEQ ID NO: 651
  source 1..499: mol_type = other DNA

SEQ ID NO: 958 - DNA, 499 bp, Homo sapiens; identical to SEQ ID NO: 652
  source 1..499: mol_type = other DNA

SEQ ID NO: 959 - DNA, 499 bp, Homo sapiens; identical to SEQ ID NO: 653
  source 1..499: mol_type = other DNA

SEQ ID NO: 960 - DNA, 499 bp, Homo sapiens; identical to SEQ ID NO: 654
  source 1..499: mol_type = other DNA

SEQ ID NO: 961 - DNA, 499 bp, Homo sapiens; identical to SEQ ID NO: 655
  source 1..499: mol_type = other DNA

SEQ ID NO: 962 - DNA, 499 bp, Homo sapiens; identical to SEQ ID NO: 656
  source 1..499: mol_type = other DNA

SEQ ID NO: 963 - DNA, 499 bp, Homo sapiens; identical to SEQ ID NO: 657
  source 1..499: mol_type = other DNA

SEQ ID NO: 964 - DNA, 499 bp, Homo sapiens; identical to SEQ ID NO: 658
  source 1..499: mol_type = other DNA

SEQ ID NO: 965 - DNA, 499 bp, Homo sapiens; identical to SEQ ID NO: 659
  source 1..499: mol_type = other DNA

SEQ ID NO: 966 - DNA, 499 bp, Homo sapiens; identical to SEQ ID NO: 660
  source 1..499: mol_type = other DNA

SEQ ID NO: 967 - DNA, 499 bp, Homo sapiens; identical to SEQ ID NO: 661
  source 1..499: mol_type = other DNA

SEQ ID NO: 968 - DNA, 499 bp, Homo sapiens; identical to SEQ ID NO: 662
  source 1..499: mol_type = other DNA

SEQ ID NO: 969 - DNA, 499 bp, Homo sapiens; identical to SEQ ID NO: 663
  source 1..499: mol_type = other DNA

SEQ ID NO: 970 - DNA, 499 bp, Homo sapiens; identical to SEQ ID NO: 664
  source 1..499: mol_type = other DNA

SEQ ID NO: 971 - DNA, 499 bp, Homo sapiens; identical to SEQ ID NO: 665
  source 1..499: mol_type = other DNA

SEQ ID NO: 972 - DNA, 499 bp, Homo sapiens; identical to SEQ ID NO: 666
  source 1..499: mol_type = other DNA

SEQ ID NO: 973 - DNA, 499 bp, Homo sapiens; identical to SEQ ID NO: 667
  source 1..499: mol_type = other DNA

SEQ ID NO: 974 - DNA, 499 bp, Homo sapiens; identical to SEQ ID NO: 668
  source 1..499: mol_type = other DNA

SEQ ID NO: 975 - DNA, 499 bp, Homo sapiens; identical to SEQ ID NO: 669
  source 1..499: mol_type = other DNA

SEQ ID NO: 976 - DNA, 499 bp, Homo sapiens; identical to SEQ ID NO: 670
  source 1..499: mol_type = other DNA

SEQ ID NO: 977 - DNA, 499 bp, Homo sapiens; identical to SEQ ID NO: 671
  source 1..499: mol_type = other DNA

SEQ ID NO: 978 - DNA, 499 bp, Homo sapiens; identical to SEQ ID NO: 672
  source 1..499: mol_type = other DNA

SEQ ID NO: 979 - DNA, 499 bp, Homo sapiens; identical to SEQ ID NO: 673
  source 1..499: mol_type = other DNA

SEQ ID NO: 980 - DNA, 499 bp, Homo sapiens; identical to SEQ ID NO: 674
  source 1..499: mol_type = other DNA

SEQ ID NO: 981 - DNA, 499 bp, Homo sapiens; identical to SEQ ID NO: 675
  source 1..499: mol_type = other DNA

SEQ ID NO: 982 - DNA, 499 bp, Homo sapiens; identical to SEQ ID NO: 676
  source 1..499: mol_type = other DNA

SEQ ID NO: 983 - DNA, 499 bp, Homo sapiens; identical to SEQ ID NO: 677
  source 1..499: mol_type = other DNA

SEQ ID NO: 984 - DNA, 499 bp, Homo sapiens; identical to SEQ ID NO: 678
  source 1..499: mol_type = other DNA

SEQ ID NO: 985 - DNA, 499 bp, Homo sapiens; identical to SEQ ID NO: 679
  source 1..499: mol_type = other DNA

SEQ ID NO: 986 - DNA, 499 bp, Homo sapiens; identical to SEQ ID NO: 680
  source 1..499: mol_type = other DNA

SEQ ID NO: 987 - DNA, 499 bp, Homo sapiens; identical to SEQ ID NO: 681
  source 1..499: mol_type = other DNA

SEQ ID NO: 988 - DNA, 499 bp, Homo sapiens; identical to SEQ ID NO: 682
  source 1..499: mol_type = other DNA

SEQ ID NO: 989 - DNA, 499 bp, Homo sapiens; identical to SEQ ID NO: 683
  source 1..499: mol_type = other DNA

SEQ ID NO: 990 - DNA, 499 bp, Homo sapiens; identical to SEQ ID NO: 684
  source 1..499: mol_type = other DNA

SEQ ID NO: 991 - DNA, 499 bp, Homo sapiens; identical to SEQ ID NO: 685
  source 1..499: mol_type = other DNA

SEQ ID NO: 992 - DNA, 499 bp, Homo sapiens; identical to SEQ ID NO: 686
  source 1..499: mol_type = other DNA

SEQ ID NO: 993 - DNA, 499 bp, Homo sapiens; identical to SEQ ID NO: 687
  source 1..499: mol_type = other DNA

SEQ ID NO: 994 - DNA, 499 bp, Homo sapiens; identical to SEQ ID NO: 688
  source 1..499: mol_type = other DNA

SEQ ID NO: 995 - DNA, 499 bp, Homo sapiens; identical to SEQ ID NO: 689
  source 1..499: mol_type = other DNA

SEQ ID NO: 996 - DNA, 499 bp, Homo sapiens; identical to SEQ ID NO: 690
  source 1..499: mol_type = other DNA

SEQ ID NO: 997 - DNA, 499 bp, Homo sapiens; identical to SEQ ID NO: 691
  source 1..499: mol_type = other DNA

SEQ ID NO: 998 - DNA, 499 bp, Homo sapiens; identical to SEQ ID NO: 692
  source 1..499: mol_type = other DNA

SEQ ID NO: 999 - DNA, 499 bp, Homo sapiens; identical to SEQ ID NO: 693
  source 1..499: mol_type = other DNA

SEQ ID NO: 1000 - DNA, 499 bp, Homo sapiens; identical to SEQ ID NO: 694
  source 1..499: mol_type = other DNA

SEQ ID NO: 1001 - DNA, 499 bp, Homo sapiens; identical to SEQ ID NO: 695
  source 1..499: mol_type = other DNA

SEQ ID NO: 1002 - DNA, 499 bp, Homo sapiens; identical to SEQ ID NO: 696
  source 1..499: mol_type = other DNA

SEQ ID NO: 1003 - DNA, 499 bp, Homo sapiens; identical to SEQ ID NO: 697
  source 1..499: mol_type = other DNA

SEQ ID NO: 1004 - DNA, 499 bp, Homo sapiens; identical to SEQ ID NO: 698
  source 1..499: mol_type = other DNA

SEQ ID NO: 1005 - DNA, 499 bp, Homo sapiens; identical to SEQ ID NO: 699
  source 1..499: mol_type = other DNA

SEQ ID NO: 1006 - DNA, 499 bp, Homo sapiens; identical to SEQ ID NO: 700
  source 1..499: mol_type = other DNA

SEQ ID NO: 1007 - DNA, 499 bp, Homo sapiens; identical to SEQ ID NO: 701
  source 1..499: mol_type = other DNA

SEQ ID NO: 1008 - DNA, 499 bp, Homo sapiens; identical to SEQ ID NO: 702
  source 1..499: mol_type = other DNA

SEQ ID NO: 1009 - DNA, 499 bp, Homo sapiens; identical to SEQ ID NO: 703
  source 1..499: mol_type = other DNA

SEQ ID NO: 1010 - DNA, 499 bp, Homo sapiens; identical to SEQ ID NO: 704
  source 1..499: mol_type = other DNA

SEQ ID NO: 1011 - DNA, 499 bp, Homo sapiens; identical to SEQ ID NO: 705
  source 1..499: mol_type = other DNA

SEQ ID NO: 1012 - DNA, 499 bp, Homo sapiens; identical to SEQ ID NO: 706
  source 1..499: mol_type = other DNA

SEQ ID NO: 1013 - DNA, 499 bp, Homo sapiens; identical to SEQ ID NO: 707
  source 1..499: mol_type = other DNA

SEQ ID NO: 1014 - DNA, 499 bp, Homo sapiens; identical to SEQ ID NO: 708
  source 1..499: mol_type = other DNA

SEQ ID NO: 1015 - DNA, 499 bp, Homo sapiens; identical to SEQ ID NO: 709
  source 1..499: mol_type = other DNA

SEQ ID NO: 1016 - DNA, 499 bp, Homo sapiens; identical to SEQ ID NO: 710
  source 1..499: mol_type = other DNA

SEQ ID NO: 1017 - DNA, 499 bp, Homo sapiens; identical to SEQ ID NO: 711
  source 1..499: mol_type = other DNA

SEQ ID NO: 1018 - DNA, 499 bp, Homo sapiens; identical to SEQ ID NO: 712
  source 1..499: mol_type = other DNA

SEQ ID NO: 1019 - DNA, 499 bp, Homo sapiens; identical to SEQ ID NO: 713
  source 1..499: mol_type = other DNA

SEQ ID NO: 1020 - DNA, 499 bp, Homo sapiens; identical to SEQ ID NO: 714
  source 1..499: mol_type = other DNA

SEQ ID NO: 1021 - DNA, 499 bp, Homo sapiens; identical to SEQ ID NO: 715
  source 1..499: mol_type = other DNA

SEQ ID NO: 1022 - DNA, 499 bp, Homo sapiens; identical to SEQ ID NO: 716
  source 1..499: mol_type = other DNA

SEQ ID NO: 1023 - DNA, 499 bp, Homo sapiens; identical to SEQ ID NO: 717
  source 1..499: mol_type = other DNA

SEQ ID NO: 1024 - DNA, 499 bp, Homo sapiens; identical to SEQ ID NO: 718
  source 1..499: mol_type = other DNA

SEQ ID NO: 1025 - DNA, 499 bp, Homo sapiens; identical to SEQ ID NO: 719
  source 1..499: mol_type = other DNA

SEQ ID NO: 1026 - DNA, 499 bp, Homo sapiens; identical to SEQ ID NO: 720
  source 1..499: mol_type = other DNA

SEQ ID NO: 1027 - DNA, 499 bp, Homo sapiens; identical to SEQ ID NO: 721
  source 1..499: mol_type = other DNA

SEQ ID NO: 1028 - DNA, 499 bp, Homo sapiens; identical to SEQ ID NO: 722
  source 1..499: mol_type = other DNA

SEQ ID NO: 1029 - DNA, 499 bp, Homo sapiens; identical to SEQ ID NO: 723
  source 1..499: mol_type = other DNA

SEQ ID NO: 1030 - DNA, 499 bp, Homo sapiens; identical to SEQ ID NO: 724
  source 1..499: mol_type = other DNA

SEQ ID NO: 1031 - DNA, 499 bp, Homo sapiens; identical to SEQ ID NO: 725
  source 1..499: mol_type = other DNA

SEQ ID NO: 1032 - DNA, 499 bp, Homo sapiens; identical to SEQ ID NO: 726
  source 1..499: mol_type = other DNA

SEQ ID NO: 1033 - DNA, 499 bp, Homo sapiens; identical to SEQ ID NO: 727
  source 1..499: mol_type = other DNA

SEQ ID NO: 1034 - DNA, 499 bp, Homo sapiens; identical to SEQ ID NO: 728
  source 1..499: mol_type = other DNA

SEQ ID NO: 1035 - DNA, 499 bp, Homo sapiens; identical to SEQ ID NO: 729
  source 1..499: mol_type = other DNA

SEQ ID NO: 1036 - DNA, 499 bp, Homo sapiens; identical to SEQ ID NO: 730
  source 1..499: mol_type = other DNA

SEQ ID NO: 1037 - DNA, 499 bp, Homo sapiens; identical to SEQ ID NO: 731
  source 1..499: mol_type = other DNA

SEQ ID NO: 1038 - DNA, 499 bp, Homo sapiens; identical to SEQ ID NO: 732
  source 1..499: mol_type = other DNA

SEQ ID NO: 1039 - DNA, 499 bp, Homo sapiens; identical to SEQ ID NO: 733
  source 1..499: mol_type = other DNA

SEQ ID NO: 1040 - DNA, 499 bp, Homo sapiens; identical to SEQ ID NO: 734
  source 1..499: mol_type = other DNA

SEQ ID NO: 1041 - DNA, 499 bp, Homo sapiens; identical to SEQ ID NO: 735
  source 1..499: mol_type = other DNA

SEQ ID NO: 1042 - DNA, 499 bp, Homo sapiens; identical to SEQ ID NO: 736
  source 1..499: mol_type = other DNA

SEQ ID NO: 1043 - DNA, 499 bp, Homo sapiens; identical to SEQ ID NO: 737
  source 1..499: mol_type = other DNA

SEQ ID NO: 1044 - DNA, 499 bp, Homo sapiens; identical to SEQ ID NO: 738
  source 1..499: mol_type = other DNA

SEQ ID NO: 1045 - DNA, 499 bp, Homo sapiens; identical to SEQ ID NO: 739
  source 1..499: mol_type = other DNA

SEQ ID NO: 1046 - DNA, 499 bp, Homo sapiens; identical to SEQ ID NO: 740
  source 1..499: mol_type = other DNA

SEQ ID NO: 1047 - DNA, 499 bp, Homo sapiens; identical to SEQ ID NO: 741
  source 1..499: mol_type = other DNA

SEQ ID NO: 1048 - DNA, 499 bp, Homo sapiens; identical to SEQ ID NO: 742
  source 1..499: mol_type = other DNA

SEQ ID NO: 1049 - DNA, 499 bp, Homo sapiens; identical to SEQ ID NO: 743
  source 1..499: mol_type = other DNA

SEQ ID NO: 1050 - DNA, 499 bp, Homo sapiens; identical to SEQ ID NO: 744
  source 1..499: mol_type = other DNA

SEQ ID NO: 1051 - DNA, 499 bp, Homo sapiens; identical to SEQ ID NO: 745
  source 1..499: mol_type = other DNA

SEQ ID NO: 1052 - DNA, 499 bp, Homo sapiens; identical to SEQ ID NO: 746
  source 1..499: mol_type = other DNA

SEQ ID NO: 1053 - DNA, 499 bp, Homo sapiens; identical to SEQ ID NO: 747
  source 1..499: mol_type = other DNA

SEQ ID NO: 1054 - DNA, 499 bp, Homo sapiens; identical to SEQ ID NO: 748
  source 1..499: mol_type = other DNA

SEQ ID NO: 1055 - DNA, 499 bp, Homo sapiens; identical to SEQ ID NO: 749
  source 1..499: mol_type = other DNA

SEQ ID NO: 1056 - DNA, 499 bp, Homo sapiens; identical to SEQ ID NO: 750
  source 1..499: mol_type = other DNA

SEQ ID NO: 1057 - DNA, 499 bp, Homo sapiens; identical to SEQ ID NO: 751
  source 1..499: mol_type = other DNA

SEQ ID NO: 1058 - DNA, 499 bp, Homo sapiens; identical to SEQ ID NO: 752
  source 1..499: mol_type = other DNA

SEQ ID NO: 1059 - DNA, 499 bp, Homo sapiens; identical to SEQ ID NO: 753
  source 1..499: mol_type = other DNA

SEQ ID NO: 1060 - DNA, 499 bp, Homo sapiens; identical to SEQ ID NO: 754
  source 1..499: mol_type = other DNA

SEQ ID NO: 1061 - DNA, 499 bp, Homo sapiens; identical to SEQ ID NO: 755
  source 1..499: mol_type = other DNA

SEQ ID NO: 1062 - DNA, 499 bp, Homo sapiens; identical to SEQ ID NO: 756
  source 1..499: mol_type = other DNA

SEQ ID NO: 1063 - DNA, 499 bp, Homo sapiens; identical to SEQ ID NO: 757
  source 1..499: mol_type = other DNA

SEQ ID NO: 1064 - DNA, 499 bp, Homo sapiens; identical to SEQ ID NO: 758
  source 1..499: mol_type = other DNA

SEQ ID NO: 1065 - DNA, 499 bp, Homo sapiens; identical to SEQ ID NO: 759
  source 1..499: mol_type = other DNA

SEQ ID NO: 1066 - DNA, 499 bp, Homo sapiens; identical to SEQ ID NO: 760
  source 1..499: mol_type = other DNA

SEQ ID NO: 1067 - DNA, 499 bp, Homo sapiens; identical to SEQ ID NO: 761
  source 1..499: mol_type = other DNA

SEQ ID NO: 1068 - DNA, 499 bp, Homo sapiens; identical to SEQ ID NO: 762
  source 1..499: mol_type = other DNA

SEQ ID NO: 1069 - DNA, 499 bp, Homo sapiens; identical to SEQ ID NO: 763
  source 1..499: mol_type = other DNA

SEQ ID NO: 1070 - DNA, 499 bp, Homo sapiens; identical to SEQ ID NO: 764
  source 1..499: mol_type = other DNA

SEQ ID NO: 1071 - DNA, 499 bp, Homo sapiens; identical to SEQ ID NO: 765
  source 1..499: mol_type = other DNA

SEQ ID NO: 1072 - DNA, 499 bp, Homo sapiens; identical to SEQ ID NO: 766
  source 1..499: mol_type = other DNA

SEQ ID NO: 1073 - DNA, 499 bp, Homo sapiens; identical to SEQ ID NO: 767
  source 1..499: mol_type = other DNA

SEQ ID NO: 1074 - DNA, 499 bp, Homo sapiens; identical to SEQ ID NO: 768
  source 1..499: mol_type = other DNA

SEQ ID NO: 1075 - DNA, 499 bp, Homo sapiens; identical to SEQ ID NO: 769
  source 1..499: mol_type = other DNA

SEQ ID NO: 1076 - DNA, 499 bp, Homo sapiens; identical to SEQ ID NO: 770
  source 1..499: mol_type = other DNA

SEQ ID NO: 1077 - DNA, 499 bp, Homo sapiens; identical to SEQ ID NO: 771
  source 1..499: mol_type = other DNA

SEQ ID NO: 1078 - DNA, 499 bp, Homo sapiens; identical to SEQ ID NO: 772
  source 1..499: mol_type = other DNA

SEQ ID NO: 1079 - DNA, 499 bp, Homo sapiens; identical to SEQ ID NO: 773
  source 1..499: mol_type = other DNA

SEQ ID NO: 1080 - DNA, 499 bp, Homo sapiens; identical to SEQ ID NO: 774
  source 1..499: mol_type = other DNA

SEQ ID NO: 1081 - DNA, 499 bp, Homo sapiens; identical to SEQ ID NO: 775
  source 1..499: mol_type = other DNA

SEQ ID NO: 1082 - DNA, 499 bp, Homo sapiens; identical to SEQ ID NO: 776
  source 1..499: mol_type = other DNA

SEQ ID NO: 1083 - DNA, 499 bp, Homo sapiens; identical to SEQ ID NO: 777
  source 1..499: mol_type = other DNA

SEQ ID NO: 1084 - DNA, 499 bp, Homo sapiens; identical to SEQ ID NO: 778
  source 1..499: mol_type = other DNA

SEQ ID NO: 1085 - DNA, 499 bp, Homo sapiens; identical to SEQ ID NO: 779
  source 1..499: mol_type = other DNA

SEQ ID NO: 1086 - DNA, 499 bp, Homo sapiens; identical to SEQ ID NO: 780
  source 1..499: mol_type = other DNA

SEQ ID NO: 1087 - DNA, 499 bp, Homo sapiens; identical to SEQ ID NO: 781
  source 1..499: mol_type = other DNA

SEQ ID NO: 1088 - DNA, 499 bp, Homo sapiens; identical to SEQ ID NO: 782
  source 1..499: mol_type = other DNA

SEQ ID NO: 1089 - DNA, 499 bp, Homo sapiens; identical to SEQ ID NO: 783
  source 1..499: mol_type = other DNA

SEQ ID NO: 1090 - DNA, 499 bp, Homo sapiens; identical to SEQ ID NO: 784
  source 1..499: mol_type = other DNA

SEQ ID NO: 1091 - DNA, 499 bp, Homo sapiens; identical to SEQ ID NO: 785
  source 1..499: mol_type = other DNA

SEQ ID NO: 1092 - DNA, 499 bp, Homo sapiens; identical to SEQ ID NO: 786
  source 1..499: mol_type = other DNA

SEQ ID NO: 1093 - DNA, 499 bp, Homo sapiens; identical to SEQ ID NO: 787
  source 1..499: mol_type = other DNA

SEQ ID NO: 1094 - DNA, 499 bp, Homo sapiens; identical to SEQ ID NO: 788
  source 1..499: mol_type = other DNA

SEQ ID NO: 1095 - DNA, 499 bp, Homo sapiens; identical to SEQ ID NO: 789
  source 1..499: mol_type = other DNA

SEQ ID NO: 1096 - DNA, 499 bp, Homo sapiens; identical to SEQ ID NO: 790
  source 1..499: mol_type = other DNA

SEQ ID NO: 1097 - DNA, 499 bp, Homo sapiens; identical to SEQ ID NO: 791
  source 1..499: mol_type = other DNA

SEQ ID NO: 1098 - DNA, 499 bp, Homo sapiens; identical to SEQ ID NO: 792
  source 1..499: mol_type = other DNA

SEQ ID NO: 1099 - DNA, 499 bp, Homo sapiens; identical to SEQ ID NO: 793
  source 1..499: mol_type = other DNA

SEQ ID NO: 1100 - DNA, 499 bp, Homo sapiens; identical to SEQ ID NO: 794
  source 1..499: mol_type = other DNA

SEQ ID NO: 1101 - DNA, 499 bp, Homo sapiens; identical to SEQ ID NO: 795
  source 1..499: mol_type = other DNA

SEQ ID NO: 1102 - DNA, 499 bp, Homo sapiens; identical to SEQ ID NO: 796
  source 1..499: mol_type = other DNA

SEQ ID NO: 1103 - DNA, 499 bp, Homo sapiens; identical to SEQ ID NO: 797
  source 1..499: mol_type = other DNA

SEQ ID NO: 1104 - DNA, 499 bp, Homo sapiens; identical to SEQ ID NO: 798
  source 1..499: mol_type = other DNA

SEQ ID NO: 1105 - DNA, 499 bp, Homo sapiens
  source 1..499: mol_type = other DNA
gtaagaacctccctggagacagagccccctccttgtctgtctccgagtgcagcagccctctcctaagacagccggtcctgcgcagcgtggggcacgccagggtctgggaggccgcctgattcgttggccgctccaggctgtgccggtggggcccgcattcctcagcgaggcacagtgctgaccaagggcgtcctgagtgcccagcagggccgaggagctgggaagcccaggaccagttccccacaggggaggcccgtcagatggtggctccgggcctgtccctgcagagcagaggcctggcccagcctccgacaggcagtgaggttatgtcctcagcctggtggacgtggatgtgggcttgtcccccacatgacacccgacgcctcctcccagctcagcatccgggctctgtctcagccgagcctgccagcactcttaggcctcggtgccctgtgtccaggggacgagagcccagcgccagcacctcccagcgggacac

SEQ ID NO: 1106 - DNA, 499 bp, Homo sapiens
  source 1..499: mol_type = other DNA
ttagaaaccgcagagaagtagctggcgggcgggggagttgaaactcccttctatctaggactctctcgggacacctccacatcgattctttttgtttgtttttttgagatggaatcttgatctgttgcccaggctggagtgcagtggcatgatctcggctcactgcaacctctgcctcccgggttcaagtgatcctcccgcctcagcctcccaagtagctgggagtacaggtgtgcgccagcacgcccggataatttttttatttttagtcgagacggggtttcaccacgttggccaggatggtctcgaactcctgacctcaggtgatccacccgcctcggcctcccaaagcgctgggattacaggcgtgagccaccgcgcccggcctgcatatccattcttgggaacacttgttgcttagctgaagcggagcccgcatcctgcctgtggcagcactcgccccggtgctggtctgagcagacgcctcctttctcttgca

SEQ ID NO: 1107 - DNA, 499 bp, Homo sapiens
  source 1..499: mol_type = other DNA
gtgagtgtgcggagcgccgaggctcgcgttccgccgctgcttccgtcgccggggcgggcgccgcggtgtccctgccgagcgtgagccccgaactgtcaccgcgccgagccccagcctcatccgtcggtgtccgcggtccgagctttccccgcctcgctggcggcccgcgctctcccccgccgtgcgcgttcgccgctgtggcctgtagctacctcgcctcgctgctttgtctccgctgctcttgccgtccttcccgcggccttctgcgggcggggctgtcggctgtcgctttgctgctccgcgacggcggccttgagtctcgctcccccggtgggaaacgtagaactggttactcgccaccttaggcggtggggtttgaatgagagcggtgcctcggtaggtcgtcagaaagttacagtcgcccatctgagcgtttgtaagagatggaggcaggagtggtgaggtgagagccccagatctgagggttggtactgcatta

SEQ ID NO: 1108 - DNA, 499 bp, Homo sapiens
  source 1..499: mol_type = other DNA
caggaccgaacaggcggccggggagtgggcgcgggctcgctgggccccgaaggcgagtggcggaggccgctcgcccggggcgccgacgccgctcccagagaggagggggcggggcgcccgggtccccggaggtggcgccttttgtctgccttacccggccgctccgccccgctcccttcctctctcctgcgacctagccccctgcccttttggtggactcctcctcaggggccctccggcgcgcgcgctcccgcccttgttttgtttggatttgggggaggagggggagctcttctctggccgtgcgaccctgcgtcccagcgcgcctgcgtcggcgtcctctgcccgccccgattggctgagggctgcgcatgctccgaggcccgccgcggtccggcgtccgcccgcgccctcccctcaccccactccctcagcggttttcggagccggttcgaaagatgccggcggcggtgactggctgcggcgggcccgccccccg

SEQ ID NO: 1109 - DNA, 499 bp, Homo sapiens
  source 1..499: mol_type = other DNA
tccctcagccccagtgaacgtcaccgtcaggcacctcaaggccaactctgcagtggtgagctgggatgttctggaggatgaggttgtcatcggatttgccatctcccagcaggtaatgctccactgtccttaggagggaaggacacatcaagacagtagtggcagatgggggtaggagtgtggcagtggtggtgatggagaaatagaaaggaaataggaacttggggcaagggagatgaacagcaatttggacatatgtctgaaaattggggccccattcagacatatgtctgaaaattctctagaagagaatcagtcagtgagggagggtttgggaactttcaagtggaacacagaaattaaggttttgatctcagagacatctgcatttaggacctagctccagtgcttactagatgtgtggccttgggcaacttccccaacctctctgaacctgtttccttccctgtaaaatggagatattgatagcggaggtgat

SEQ ID NO: 1110 - DNA, 499 bp, Homo sapiens
  source 1..499: mol_type = other DNA
tcccagtccagggctcaccccagcctgacacttctcgatctctgggtctttctccttcgcgcaaggtcactcattggacagggcagtattgtcaaaagagcactggactggggagtccttttgtctgcttttcatcagctaaccttcagtttctgtccacctatgtcccctacataactctctccacaactctaaccacccatcccttagatagggccccggcccaggcccatcactttgagccttggacccctcatggggccggcctgtggccagcaggggcttccgtcccagtcatgaggagcctggggcctcttgggcttggttcttcaacccactgaagagctgagagccatgtcactggaccccacttgaggccttagtttcttccttcccctcctgcatggccttccccaggtttccccttcttacttatgagacagtgggtctgggcctcacaataggggatgctcaggcttaggtgcctccccgtccccca

SEQ ID NO: 1111 - DNA, 499 bp, Homo sapiens
  source 1..499: mol_type = other DNA
tgcgcggctcctttaagcggactccggaacgccgtggggaaggcggggccgaagcccagccatcgccaacttggaggggcggggcagaaccagggggcggggcctgcgtggtgcgtgcgtgcgcgttctggaggaggcgccgccgccgctcccgaggcccctgccgccgccgctcccgctgctgtcgccgcgcagagccggagcaggagccacggccgagaggagggaggaggaggaggaggaggtggaggaggtggaggaggtggaggaggcgccggaccgggggggtgagtaaggggcggggagctccagacggccccagagggagcggggggcgcgggtcggccgagccgagggtgaggcggctcatgtcgccggtcagtcgcctggctcccccttcctcctccgcgttccatcggtgtcggggcggcggcccgggggcctggccggcgggaggggccggagatctgggaggcccggccgccgccagggccagagc

SEQ ID NO: 1112 - DNA, 499 bp, Homo sapiens
  source 1..499: mol_type = other DNA
ttggacatcgctgccttcctcctcttgcatgtcccctgtctagggtcagagcttccttcaaacccagctctcccttttgggcccgcgggggcgggggggagggacacacggggaacggggttggagggttgggtgaattctctgtcctctgctgtaggagtgcgggtagactggagcattgctgtctccgggctcacttctgtcagggttcagggtctccctttccttcctttattcccccagttaatagggctgacatctacatcccactccaccttccagcccctttcccgccttctttaccctcatgtcttccgtagcttaccatgtgttcgccttttcagtgttacttttcatgggtctctgcttcttccctgaattttgttagggaagaggtcacggtgtgattcttgttatccttcaaactagcggcttggtaagagtatctcttgcccccttaatcaggaagttaaggacggtgtcttcagccgagttgtgt

SEQ ID NO: 1113 - DNA, 499 bp, Homo sapiens
  source 1..499: mol_type = other DNA
gtgagtgtgtttggggagcatggtccccagggctctgggcaggcagtcctagtgtctgggagaaggtagaaaagggtgaaattgatgattctgggagaggacatgctgcatgagtgataagaaaacctgtggagtgccaggtgaggtggctcatgcctgtaatcccagcatttagggaggccgaggcaggtggatcacctgaggtcaggagttcaagaccagcctggccaacatagtgaaaccttgtctctactaaaactacaaaaattagctggttgcatgcctgtaatcccagatattatacttgggaagcagaggcacaagaatttcttgaacccgggaggtcaaggctgctgtgagttgagattgtgccactgcattccagcctaggtggatagagcgagactccatctcaaaaaaaaaaaaaaagaaaagaaaagaaaaccaatggggaggagattatggggaacatgttggggttcccttcctgccctcattc

SEQ ID NO: 1114 - DNA, 499 bp, Homo sapiens
  source 1..499: mol_type = other DNA
agagcgagactccgtctcaaaaaacaaaaaacaaaaacaaaaacaacaacaaaaaaaattagccaggcatggcagcatgcacctgtaatcccagttacttgggaggctgaggcagaagaattgcttgaacccgggaggtggaggtggcagtgagccaagatcgcaccactgcactccagcctgggggacagagtgagactccgtctcggggggaaaaaaagtggaaccattctggctgaaagaggagagtctctacagactcctttatcctctagtggctcataagggaccttcccttagccctttctcaatgttttagaaactactgccttaagaagtttatggaaaggacccctggggctgaaagagggtgggaaacttctttggcaaagtgtaagtggtcaggctttacaaatgcaacagattcagaaataggtaggagggaggcttggaacaggttccttctcattccctgtgactcctcttcttaccctctcca

SEQ ID NO: 1115 - DNA, 499 bp, Homo sapiens
  source 1..499: mol_type = other DNA
gtttttgtttttttttttttttttttgagacagagtctcactctgtcacctgggctagcgtacagtggtgtgatatcagctcactgcaacctctggatgcaagcaatcctcctgccttagcctccagagtagctgggactacaggtgcatatcaccactcctgactaatttttttttttttttttttttgagacacagtcttgctctgtcgcccaggctggagtgcagtggcatgatctcagctcactgtaagctccgcctcccagtttcatgccattctcctgcctcagcctcccaagtagctgggactacaggcgcccaccaccacacctagctatttttttgcatttttagtagagacgggttttcaccgtgttagccaggaccgtctcgatctgacctcgtgatctgcccgcctcggcctcccaaagtgctgggattacaggcgtgagccactgcgcgtggcctccgactaattttttaaaatattttttggtag

SEQ ID NO: 1116 - DNA, 499 bp, Homo sapiens
  source 1..499: mol_type = other DNA
tatgagccattacacctggcctattttcttttttttttttgaggtggtctcactctgtcatccatgctggaatgtagtgcatctcagctcactgtgacctccacctcctcccaagctcaagtgatcctcctgcctcggccttccgaggagctgggactacaggcatgcactaccatgccctgctaatttttatattttttgtaaagacagggtctcactttgttgctgaggccagtcttgaactcctgggctcaagcaatccacccacctcagccccgagaagtgttcctcccaaagtgtggggattgtacatgtgagccactgtgtcccgcctgacttttttattttcccagtatgatgattgtgaatggtatctggttttcatcattttaattagcatttccctgatttgtaatgaggttcaaaaatcttttcatgggttcactagccttttgtgtttcgttttctgtgaaatgcctgttcatgccttttgctcatt

SEQ ID NO: 1117 - DNA, 499 bp, Homo sapiens
  source 1..499: mol_type = other DNA
gtaagcgtctgcagcccagaacttcagatgtaggttgatcccaggcagagaacctggggcttttgtttaaggagaaagcgaggtcttggagctggagaaaaccatttcttgcctgtgcagttggtttgttggtagaacattcctaaaatactcccacagcattttgtcccacagaatggcatctctcctgcaaaactgttgtgagaggtgaaactttttcctggccatttggaggctgtgagcaaggagcagaatcttccgtgaggttccttaggagccccagggcagagcctaagggatgatgttttcacacaggatgcccagcagagtgtgggagggagagcgcacccaggggaaggggtggccctgggatcagagagccagggtgagtgctcaaagtcagcaatgcctgcagcggaagagaaggagggtgcctgacgcgcaggactcccagggagcctagaaggcagggccagagctccctgctggccaaggaaac

SEQ ID NO: 1118 - DNA, 499 bp, Homo sapiens
  source 1..499: mol_type = other DNA
ctcttgggcttttggggcatgggttcaggggcctcatttccatattgccttataagagatgcagggttagcccaatggtcctcttcccccagctgctacttgcccctctgggccttcactgtggccctttgctctccctcattccccctcccagtcccatctctgctcagtccccacacctggtctggctgctcattctttccctttctgcagctcgagtctccccaggtgggtgctggtttcactcagttggtggcacctatgtgcacagaatttgcctctgctcctgagccacaaattcacatggctttccgcctatgtgcctgttgtgtgcattgcagcacgcatctgccctgtgaggtgtgtgtgtgtgtgtgtgtgtgtgtgtgtgtgtgtgtgtgtgtgaagggtgggagggaggaggggcagcaggagggggcagtgggtctgttctatttttaccagccagttgctgctggacacagttttcatagcctcc

SEQ ID NO: 1119 - DNA, 499 bp, Homo sapiens
  source 1..499: mol_type = other DNA
tcccaagggcccacctcttcatccatagggggttagtatttcagcatatggtctttggggggcatctcaacatttagtccataagagagggtaagtccagcctcagtcactccatcttgactagaaacactagtcctagcttctggttttgaggcctgtatcttttcatcccattattccctagtaggatggaactggaaggttctaccactatcactgtttcttctgaggcccctggatcattcggtattagtttgttgtgtcaaagaggcttgtagttagttataggccttgaagaatggggctagtaatagcctgaggtggagaggctacaatgttgctgtttcccctgtgacttcctagctcccaagtctaagtggctcccgggcaaggctctgtagtcaggacctctgagggccgaggccatcctggtgcggtagcttatgctggggcagatgggatggcagaccttgctccagctcccctcttccttccccag

SEQ ID NO: 1120 - DNA, 499 bp, Homo sapiens
  source 1..499: mol_type = other DNA
taggggctgccagaggtgggctgtgccccatggactgacgtcgcagggcctctcggggagtgatgctgctgggtgagggcagggcttggtctgacagcatccaatcctggagccttcctccaggccctggcggtctctgtccactcagtcagcaaacaggggcttccagcgtcatccatgcccaagcccctcagcacccctcccgccctgctcccctcgatgccctgctttatggctgaccccttttctgttctgccagccgggagcaggagggaacagagtccaccactgatgagggccagctgccccaggtggtggaggagctgagagacctccaggtggcccctggcacacgcctggccaagttccagctcaaggtgaaaggtgagaaggagagggagtggggacacagccatggcaggatggaggccaaggagccataccccatcagccacaattgaaaggagaccccagcagcggggtcaggcagtcactcatc

SEQ ID NO: 1121 - DNA, 499 bp, Homo sapiens
  source 1..499: mol_type = other DNA
gtgagagcagcgttggcttcgaggggagtggcgggccgtggggatcgcggccgtggttgggacggccgggggtctcggcgagggcttcagggctcccggggcatgcgggggcccgggctagggccggctgccggtgctggtcgggcggggcgggtcgggccgggggcgggctggcaggggccgcgtctgggcctccgtgacgcggacgccgagccctgccccagggagcgggaggcgggaggcgggggccaggcggctcctcctcgtcgcgaactctggatgaccttggccaaatcgcttcagttccccgagctggcgacttcgtctgtaaaatgcgagtcatagccctgtctcctagatgggccgtgtggaggctcagtggcgggaacgcctgcggggcagccggggtcctgggcggtttgctagggacgcctcactgggggtgagggtgaaagggcttccacggggatcattttgtcacaggctttgttgggggggc

SEQ ID NO: 1122 - DNA, 499 bp, Homo sapiens
  source 1..499: mol_type = other DNA
cctcccgggtagctgggactacaggcatacaccactatcacacacacctaatttctaaaattttttgtagatacgggggtctcatcatattggccaggctcatctcaaactcctgagctcaagaggtcctcccgcctaggcctcccaaagcgctgggattacaggcgtgagccacattaggtaaattcttaatgagtaaattcaggtggctgccctggtggaggtggaccgttgggtgctcgaccgcccagagggcacaaaggaccaacacggtgggggtggcgagaactggggccgtagaagccagcctagtcctccgccctcgctttccctactgaatatgcgcgagggggaaactccagcctagttgttgactttctgcttcggacatgctcgcgtgttcttggctctcctcttccggacagaggcgccggagcttcatccgttccgggctttgccgctcaccgcctctcccttcccaggccgtaacccgcttccg

SEQ ID NO: 1123 - DNA, 499 bp, Homo sapiens
  source 1..499: mol_type = other DNA
gtagtgcccacttggtcttttctttccctcttaatccaaataattgcactagtgacactcattaatgtgttcctcctaccatttacatcaccacctaactgtgggtttcaaattgggttctcatgtgcttggtactaccacctaatctattacccatgttaattcttctaattttttatttgaatattaccttagcattctattaacttcaagctttcatttgatatttaatgttaactgatcatgcttataccctgcctgtattcatatttttacttactaaactgtgaaccctttaaaaattggaattgttttttattttcttctttgcctgagagaatcaatctgggctttcttgtcaatgttgttgcttttctttcatgatatagaaagagtacaggaaagatctagaggaaagcatccgtgggaagggcctcactgaaatggaagatacacctgacatgctaagagcaaagaatgccactcaaatcctcaatga

SEQ ID NO: 1124 - DNA, 499 bp, Homo sapiens
  source 1..499: mol_type = other DNA
ccagcctgggcatcatagcaagaccccatattaaaaaaacaggtcatgattaggaaaaaaagcaagttagcatttggtagccttaggctctccttccactgcgatttttttccccttgcctcactgacttgtaattctgaaataaagtcttttgtcaccttaagaaaggtgtgggaaagttcagaagagacaacagaggattcagagtcctgatggtgcatccatccttccactctgtgaagggcctgccccagtcacaacattagactgatgagtgaggggcccatcaaagtgtctcagcctgaatttccttgtggccatttgctccagacaaagtatttcaagtacaatcatacatgtttcaaatgtgtgaccattagcagaactatgattaagagcccatacatagaaaatgctgttttttttttcttcctgagatggagagatatattgtaataaagatttttttttaacttgtctttccttcctacttacatta

SEQ ID NO: 1125 - DNA, 499 bp, Homo sapiens
  source 1..499: mol_type = other DNA
gggggacgcgccgctcgtcccatactctcgggcggtggtcggctggctctggggtgccggcggggcggtgtgggggaggggcggccgagcccaggctcttcggcacttatcgtgggctcccccgtcccgggcggtcctagtgccggcgacagtggctccgacacgggcaggcccgggcgcgggagtggggattccggtgaccccttgttgaccctgcgggaattcctctgcactgtcgtcggtgctgggcctcggggcgtcgagtgcggtcgaggtcgggaggtttggtgcttggagggaggatacaggtttaggcccgacaaacacttagagcttgtgtggccatcttgtctttctaacggtgccatttcctccctgaggcgtggaggactggccagcccccaaacctccaagcccatcggctggatgccgtggataagcgaggggagagcgactaggccctgtctgcgggtaccttcggcgaggagaggcgacgaag

SEQ ID NO: 1126 - DNA, 499 bp, Homo sapiens
  source 1..499: mol_type = other DNA
cacggacaggcagcagggggtagggtatagggttggaggccgccgagttggcccggggatgaggagcaaacctgtggcttccgtggtctcagtggagtcccaactgtgacctggcctactggcccagacaaacctggcttgcttttttaccttttcggtctaattcttgtcagtgccaccagaccttgtcctctctccacggaaacacacgaaccaactacactgaacttcttgtagttcaaacttctgcacctttggccattgcccaaactcttaaatctggctacttcccaccttaactgccttctccttacctagtctgtgcttgtgggattccgcccaaattagatttcctccagacaggcttaggtgtttacctgatgttccagatggtatttgtccagtggactattggtgctgtgagggcagggcacatgttgtcacccatactcattgcctcggttggtgtctagcacctagtaggttctcaaatactttt

SEQ ID NO: 1127 - DNA, 499 bp, Homo sapiens
  source 1..499: mol_type = other DNA
gttccttgggacctccttctgcattctaactcgggggtctgcaaacagtaacaacaatggtggtgacagcagccttgacttacgggcttgccatgtaactggcactgggctgaatcgccactctttgaacctgggaaatagctctatggggtagggcaaaggagcccattttatagatgtgaaaactatctataaactgcaggagtgatatttacttgcccactgtcattccagggttggaatccagatccatctgcttctgaatcctcttaaccctgatgctaggtcgctgggaggtggggtgtttgatttctggggctccttgcagctcagtactgccttgaaaggcaccttggattcgagcataaatgttccatttgcatgtgcaaggtcccgtccccaggccatcgccaggtggacataaccctcgctgcctcctccaggaagccagctctgacagccctcctctctttccttgccacctccctccccctcatag

SEQ ID NO: 1128 - DNA, 499 bp, Homo sapiens
  source 1..499: mol_type = other DNA
caagtgttgcgccggcgggcctggtggactttagaaatgatgatgatgatgtttaaagaaaaagagaagtagggagcgtggcttccttgtgttgtgaattaacttgctccctgacatatgtgtaacttagggactgtatgctgctgggatgcctgaacagtggtaccagttttgtgtctggcttcgcaattttttccatcctgggcttcatggcacaagagcaaggggtggacattgctgatgtggctgagtcaggtacggtggtatcggtggcagtggtggtgggcactgccacctagtgtgtaagccaagtactgcaggcatgaagccagaccccagggggctttgaggggggacgagcctggtttctaaaatggaccccccccccgccaccaagatatcccccaaatttcaaagagtacaaagccaaattttaaacatttgtattgcaatttggccctgatgggtggcaaaagcatggggggtggttaagttgggg

SEQ ID NO: 1129 - DNA, 499 bp, Homo sapiens
  source 1..499: mol_type = other DNA
gtgtgccgggagcgtggtcggtgggctgggaacacacgtgggtggccgagacggctagaagcggtgcaagggcgggtgggaccagagggagtccgggtttgtctaggggcgcggtgaggacccaggagccgcgaagggtggacagtggtgccgggcttagggctgggggcctggaaggtttgtggaggtctgggagggagtgggagctccagggacggggcgggaatttcgggactcgtctacaaggggtgtcaggatacagagcgtgacaccaggaggggtcctggggcatattgggaagcactcacagacagtggagtcgatggcaatgaggccttgaactgcgagtggattgtgggtgagaaggaggagcagggaattatttataaaaggaatagatagggatgaggtatccggagggtgatcaggaagtgtacctgggagatttacgggggtaaggaggagccagtatagtgatgagaccgtctagggtagatca

SEQ ID NO: 1130 - DNA, 499 bp, Homo sapiens
  source 1..499: mol_type = other DNA
ggggcggcggggccgcagtcaccttcccggggaagaagccgggaccccgactgcgggcggcccgcagctcccgccgcacccccgcagccctggcggcgtccgggcgagctcacctggcggctggctgcggcctccggggcggcctctgggcgtgggccgggcgggggctgcaaggggggcggcgggagcccgggctgcagccggggccgccgccggccgccaagcctcgccccaactcgcgccggccgcggccgcccccggggagtaccgggagcgcggggagcgcgggtcccgcggcggcggcggcggcggcggcggcgcggcgcggcgcggctcaggcgtcggagcaggcggccgcgggcgccgccgcctcctcctccatggctgtttacccggctgcattgtgggagtttgacctccgccgccgccaaccgccgcctcagcttgcgccgccgccgccgccgccgccgccgcgcacgccatgggagccgtgactgac

SEQ ID NO: 1131 - DNA, 499 bp, Homo sapiens
  source 1..499: mol_type = other DNA
aacacgtcagactcatttacaagaatgctagattgtgcatatgtggcatgttaataagtaacctttggtagaactattatgatggattcaatacaatccatctatggtgcaaatcaatgataaagaactctcatgcgtctaccatgtatgactgtagaattgctggtgtaagcagaactatagcagagcaaatttcaacatgcccttggccacctgggttgtaggggacactttactttttgcattgtgctgtgaccatttcatgcataatcttggatcttcatactatttgacaaccaaaagaaagaaaagggaatggatatatatatacacacatatattatatctacatatacatacatatgtatatgcctacagtacattagcaatgctggaaatagctgatgccacaaaatgcagcctgcatgcatgcagaagtttatagctggcccttcatctgcatcgattggtgttgaaggtccttggtatgtttcgacag

SEQ ID NO: 1132 - DNA, 499 bp, Homo sapiens
  source 1..499: mol_type = other DNA
tatgagaagcttcattatgcttggagcacattttcgtgccatttgccaatgctgtaaaattgtgtaaaaatgtcagctgagaactggaaataaaacagggacatattaatatacacgccagactgtggattgtagtatgttgaattagcctaagatgtctaaattgaaagaacagcaacaaaatgcctttgtgtatctgatttcattattctcccaacaacattgctgaaatgggattagtatcattttatagaagagacttaagcatagagtaatgagttgctttgctcagggtcacacagccagtaaatggatctctggggctagcacccgtgtcatcagtcctctgacagtctcaatccattgtgctgcctctctcaggttagcaggcattaatttcaggttgaagaatcaagctacaaatccgaagttcttaactttgggaactattgaaataagtcaactctatattggtttcttattgtattttctctcaagt

SEQ ID NO: 1133 - DNA, 499 bp, Homo sapiens
  source 1..499: mol_type = other DNA
gtacgtaccatcttactccttaaaatgtttggaactttttgtttaaaaactcaaactcaaagtgaaatctcaatttgtcacaatggtggtttttttgtttgttttgggatttttttagtttttgtcccccttccttacacctttgtgtaagaggtaaaatggagaatttgcaaaataactagaaaaaagctggagtgggagccaggaaatctagcttcaatcccagctccccttctacagagctcagtgatctccagcatgtcacactgtaggctttctaggcctgttcttcatctgccacatcctggggttgttgtaaagatcaaataaggtaatatcccatttgtaaatttatttggtaaacccaaagcactatggcaatagaaatgtcaagtatattttatatgccattacccgttctaaataaagtaaacacccattccattgttaatattctaaatttctccttgttatatgtagtcattttcagaaggatcac

SEQ ID NO: 1134 - DNA, 499 bp, Homo sapiens
  source 1..499: mol_type = other DNA
gcattcactaggaggatagaatgttttaaattatcatcgctaatagagtccacatatttactttaagcatgaattaccatatataaaatattttattttaatacaataaaaatcatggaatatattttagtgggtttagtagtttaaggggaaaagatagcagcaatttaggattcatacaattaatggaattattttcaattttagaatcctaaaatattagggttagaggatcatctaggtctcactcttcattgttcatcacttgagaaaactgtatctaagaaagggcaagtgactttcccaaggtctcctggcagtcagggacactgctagagccagaatccagctctcctgacagtttaatgcttttcttgttttaaggtgtttttcaatgtattagagttttggggcagcggggggaggttgctccatgtttttacttaaatacatttttctttcatggaaaattgaattcctatgctttttgccttgttta

SEQ ID NO: 1135 - DNA, 499 bp, Homo sapiens
  source 1..499: mol_type = other DNA
aaaagaaatatactgcatgatgatttgtgcttttcgatttaatgtcacacaatcgtttttacactgtatgtgctttccctccccacagccccagtcccagccccagtctcgcagttccattccttcagggcagcttccattctaccgtgagtttttattgctttcccctaaaacgctgccctggagtcgcgtttattggacactctttagtctgtaaaggaaaaaaacacaaacaccggaggagaatcatcctaacaagccgacaacatatctatgggcctaaaaaacttaaattctttcccgttattagcacttctcgatcgttccaggaaagcccgatttgtagcttggctgccccaggaaggggcctgcgaccagaaagatgcaaagggcgggacaaggttacgagtgggtgcggggaagcctccctaacctgggggccgcgtcccagagctgcgagccacgcctcctctctcccgcccgccgcgccgccggactc

SEQ ID NO: 1136 - DNA, 499 bp, Homo sapiens
  source 1..499: mol_type = other DNA
taggcgcggggaatcggccctgaggctggtggaagaaatgtgtgaattaaagggagtgcagcgtgcagggtgggccgcgagtcgggagtgcagggctcgggacagggtgggggcggggaggacaagagactcgtcagcgcactttccacccggccggttccttcccgagccctctccctcccccggcccgcgggagcacagatccctgaaagcggagctccagataggaatgtctgcatcatcttggcagggcccagacgggagaagatgctctgctgccacggacgatccctcccgctctcctaactcttctctgaacacctcgcacccccacggccccccgcccctctcttaatcttggccacgctccctgaggggtcagacctggggtgggagagcagagaaagcggggctggcagagacaggggtgagggccgggagaggcgatgacatcattccctggcagctggcggggagagggtggggacggaggggtccc

SEQ ID NO: 1137 - DNA, 499 bp, Homo sapiens
  source 1..499: mol_type = other DNA
gtatgtttatgataatcctctcttgtttcaagtggagtttaactttcatctgatccacaattacatgttttctttttagactgcttcaaggtaaatattttataaacttttgttaagggaaatacttgtaactcacttcgtggctttataaaaaggaaaattacttttttaatgtaaatgtttgggttaaaatcaaggtatcattgcaaaagagattaaggaaggcatactatatatataataggaatatatatatgtaatagaaatatatctattcctattaagaaacattttaaaaagttaaacatttgatctgccaagtcatagtattagagattagttttagaagtaattgattgcacttcagtcgtcctctaatgtgtacctggattgtataattttaaattaaatctttagttatgtgtaaaataattgttattaaaaagaggggatttcaagatttggtttctcacaactttaataagataaccatttgact

SEQ ID NO: 1138 - DNA, 499 bp, Homo sapiens
  source 1..499: mol_type = other DNA
ccattggatgaaggaaccgtgttaagttattaatctgtgatgttccagtgtaatgacttgtaagaaaaatgtttttttaaatcagtaaaaataacataattggttaatttgatgagtagtcattaaaatacaagccatggactgtgtactgatttagctcatggtctacaaatagtacagtgccattttaaagccttaaatgatagacaactttactcgatatgaatatcatttacattaacaatgggaaccccatacactgtcttcaaattgttcttgataactaaatatataaaatggaaaggatatgcatatatatttcaatatctggattttgaaatttggagcacagaggtggagtgtcattttatattgagaatggaaagtcaggagacttgtgacacgtgatgcaattgcttccatggaatattttcagaccaataggagtttgcgaagaacttttatggagtgtataaatattttgagctgtaggcatcac

SEQ ID NO: 1139 - DNA, 499 bp, Homo sapiens
  source 1..499: mol_type = other DNA
aatattactcattttttaaaattggaaaatatagaaaagcacacaaaatatcactcagataaatactgattacagttttgatctctatccttcattgaaaacatttaagtcatttttcctgctttagagaattctattctggaagctaagccattggttgatgaatagagagaagcagagcataagcaactcattgccagtcccgctgatcacagagacagagccaactgcaaatgaaaccatcctccatccctgtcctgacactgcccatcccacccattccccctcccctgcaccccgccttgtgagcacttatgtccttgctgcccagactgagacaaaaacaacctcagggaagctgaggggttatgattttcaaacgtgggtaatcttaatgctcctggttgttttttctttctgttgttaattagcttctctctctctttctctctctctttttctctcttctcctcctccttcctctctctttctccctaag

SEQ ID NO: 1140 - DNA, 499 bp, Homo sapiens
  source 1..499: mol_type = other DNA
tatataaaacatgatacaatgtagtggcaaacagcatgactggatgcttgctttttaatattttggtgctttatggaaaatgagctgccaattaaaaaatgcatttagtgggctacagtattttcacttttagacacagtgcttttaaaagctaaatgacagctttgaaagaaaactgcatgtgctttagttaaataacaattatcataatgtagatttttaactgcttcctcaagatgtattctgcattttcagcctaatctaggccatctttcctgtcactgcatatagaacattttgtagatgcttagatgcattggttaaacatgagtatttgaaagaatcattcatatctgccttgagtaattttatgatttatgtaattttaatgaactgttctatcattttctcttcaaaagatagtcatgcatttatcttctctttctgctcagctaacctaaatgaatctccctcctttgattttgttttgttttgttgg

SEQ ID NO: 1141 - DNA, 499 bp, Homo sapiens
  source 1..499: mol_type = other DNA
gtgagtgctcacatttgtttttatcatttaccacagagttaccataaaggtaaaactgccaaactccttggccttaggtatttacagaatagacgtgtataacaataataaagagttaaatgaccaccatacactttatattataagcaatgacatatcattttgcttaaagatcatgtcatctttcagggcctacttttgcaagtactgtatcttataaaattaatctatttcatgggaagtcctgtgtatcatcaatactataattagacaaagattaaaatatgtaatgctattggaatttgtgtttcactgctttttagatttttctaaaccaccatgttcacttatcatgtttgtgttaaaagtattctggctgaggaacaaatactatacagttgaataatcttaaggggtacattaatctatagcctttcttcatctcagggtgggttgctgtggcaaccgccccagttcactttaaaataatttttaaagc

SEQ ID NO: 1142 - DNA, 499 bp, Homo sapiens
  source 1..499: mol_type = other DNA
ggcctttaggcaatgcataaaataagccctttcagtaacctcaactgcattgcaaacatttcccgatttgacaaattgtgttagcttcggatataatggatttgacattcttctgtaattctctatcagatataaaactgaaggtacagaaatacagataaacatagaatccttagatatgtgtaaaccttgtcttgaaataacaaatcctttgtatattgcaaattctcaatcacagacattccacatgctgtatattcttcttgggttaatgctgcacctagtgaatttttgaaatttagatatttggcactatttatgttaaagattattatcacaatgcatgacaatttcagttgtcttatattcaaaacactttggtttaaaatcagaatattgttacttcagattagaagttttagaaataaatctatttgaaagtattttcatatcagcattaacaaaatactatatactgttttgcacttccacatttgaa

SEQ ID NO: 1143 - DNA, 499 bp, Homo sapiens
  source 1..499: mol_type = other DNA
gaagtggcagtgaagctagaatctcagaaggccaggcatccccagttgctgtacgagagcaagctctataagattcttcaaggtggggttggcatcccccacatacggtaagaacccggtgcatataggcgatccgctgagggaagcacggaatggggaagtgggtagaggcaggtaatgagaccagctgaatccgggtcttggtgttttagttacctgggttccctatagctggtggtttcctgtaagtcagtcatctcaattactgagtaaatttcagtttgccaacttatttcattgtattacactgctccatttcgcttccgtcattctcactcttcccgaggctttcatttgcagttatgcgtgcaggtcatctttgatccctacgcggaagggttggctgctgccttttttacggcggcacttctgatgtacttaggtttgtccagtgaagtggatttgaaggtgccgaagcgacccggcagtgtcagttcga

SEQ ID NO: 1144 - DNA, 499 bp, Homo sapiens
  source 1..499: mol_type = other DNA
ggggtggggttcacgataacgctgcgcttttactcattccccccaccaccaccgtgcacccccaaagtgctcgggcctctcctcatcgcacgcactcgccagggagtccagggagctagttttcctggcttacgaacctcgtccgctgtctccctaaaagggtcaagaacccgatagaaaggttgggggaactagtttcccaccttgttaaacacgtcccataaatgtcccttagtcgagctttttttttttttaaccgtcttttaaggtggaaacggcaaaatcctctttcagtgattcccatgtttttttttttttaattcttaattctactgggcctcttgttccaattagaacagtttccgatcgcctagttccttaaaaacctctcactacgttcagaggttgcctcttttttctggatgaatcattttcctgcactttagaggacgtacggatttcgtcactaccccctgaagaggcctttgaggctggttgc

SEQ ID NO: 1145 - DNA, 499 bp, Homo sapiens
  source 1..499: mol_type = other DNA
gtaacagagttaatttaatataatattacaaatttattaggaaatatatattattgagaacacagtacattagctgcatcccctttgcaaatatgtaaaccagaactgcagaggtcacacacatatttttaaaaacttgtgtttatttgtttgtctctaaaattatttcttctcattattaccaagaaagtgctctgattacaattcccaaaaatcccaaagagaaaagaaagaaaaatgaaaaaaggtttttttaatgaaaaagataaaaaatatagaagggaagtaaagaatattaagaagcacttgtccccaaattctctgattctctcctttctattcctaaaatatatatttagtgcataatatatcccaagcacttggtaaacattggagatgatgatgacaacaaaaatggcaaagctacaaataggaagtaatatttggtaattagaactctgcattctgatattttcaaatgctctgaggcatattctgc

SEQ ID NO: 1146 - DNA, 499 bp, Homo sapiens
  source 1..499: mol_type = other DNA
tactggagccagtacttatgtgcttgagagcatagatatagtggttcaaatccaaggtctcctatttaaagatcttggaaagttatttaatcaatttatgtgaaaagtagaaataataacagaacctatatacctcatggagttgtgagcactgaatgagaaaatggtagagaatattgcctgacacgtagtaagtagacaatgttagctatcattcttatatctttcttcttcaaagcccatgttagtttacatgtacctttttttgtatatatggcatagtctgtactagtgatagaaattcatgggcttattttctattgtttacatatttagtccaatgtcttatagacaacatatgcctggagacatttgtattgtgaatatcaactcagatgccctgtgatcttaagcctcagtatacaaaacacatgaagagacttgcatttttttcctctcttattccttgtaactttttcttcccatgatctctcttgca

SEQ ID NO: 1147 - DNA, 499 bp, Homo sapiens
  source 1..499: mol_type = other DNA
ttgctataataaagtgagacaggatgatatccatttgctgtctttgtaaacgtgtgtcaatggaaatcgtcacagaataatggacagtttctgccaattctctattctctctggactatacacagagagactagaacagtgaacccctaagtccccatcacacaagtgaataagattctggtcttcgttgcttctccatgttgtgttgtcgggtttgcaagagcattttaagtcatcacgtcagtcacgaacacttccctgtgcctctctgatgaggacatccgtggtaacctccccactggcgctgtcacacctgacaaggtcaacagcactcccctcgcatcatggaatgggcagtctgtgtccagatggctctagttgaccaaaaagcagcttcttacagttgacttctccccattgactttgaacagattgttattatacgaaagtctccttttttccaccatttcataacctctggtttgttctgtcttcccag

SEQ ID NO: 1148 - DNA, 499 bp, Homo sapiens
  source 1..499: mol_type = other DNA
tgggtacgcgcctttgtctgatttcagcctaagctttttgtactttgctgcatcctattcttaagtgataaatatgttttgggggtttcggttgtttgggctttttttgttggagacggggtttcactcttggagtgcagtggcatgatcatagctcactgtagcctcgacctcctgggttcaagtgatcttcccaccttggcctcctaagtcgctgggactgccagtacacaccgccggacccagctaatgtttttgtggttgtttgtttagacagggtctcactatgttgcccgggctagtgtcaaactcctgggctcaagcgatccacccatcttagcctcccaaagtgctgggatttcgggcgtgagcccccacacccagcccattaaatgataaatgtgttgtcataagcaatatagaggcatagagaggagccctgttccccatctgggacccccctgtctccttaactagccagtgctcatattttttaagt

SEQ ID NO: 1149 - DNA, 499 bp, Homo sapiens
  source 1..499: mol_type = other DNA
tatgataaaaaataaataaattaattaatttaaaaaaaaagaccccaaatgtttgcttttaacaaaactgaattaagagaatcactgcaggccgggcgtggtggctcacgcctgtaatcccagcactttgggaggccgaggcgggcagatcacgaggtcaggagatcaagaccttcctggctaacaccgtgaaaccccatctctactaaaaatacaaaaagaaattagctgggcatggtggcgggtgcctgtagtcccagctactcaggaggctgaggcaggagaatggcgtgaacctgggaggcgaagcttgcagtgagccgagatcgcgccactgcgctccagcctgggcgacagagcaagactctgtctcaaaaaaataaaacaaaacaaacaaaaaagaatcactgcaaacaagagtactttctagcaaaatccattctgatttgcaacagcactgataaataacatggttattgggtttctttttgttttccag

SEQ ID NO: 1150 - DNA, 499 bp, Homo sapiens
  source 1..499: mol_type = other DNA
taagtaaaagccagtatttatgtctttaataacatatcaacaaagggccatgtctgaatgaagtatagaagttcgggaccagccgggtgcagtggctcacgcctgtaatcgcagcactttgggaggccaaggcgggcggatcaggaggtcaggagatcgagaccatcctggctaacacgatgaaaccccatctctactaaaaatacaggaaaattagccgggcgtggtggcgggcgcctgtagtcccagctactcgggaggctgaggcaggggaatggcttgaaccccagaggcggagcttgcagtgagccaaaatcgcaccactgcactccagcctgggcgacagagtgagactctgtctcaaaaaaaaaaaaaaaagaaggaaaaaaagttcaggacctaaagaaggaaggtcccagaaactgggtttctgtttctttctaccactacacttgctactgaaaccaagcagatgacttcatttctcttggattccact

SEQ ID NO: 1151 - DNA, 499 bp, Homo sapiens
  source 1..499: mol_type = other DNA
gtgagtcaattaaacctcttttcttcataaattacccagtttctcatagttctttatagcagtgtgaaaacagactaatggacccttctggttgaaggaatgcagccattctgcttgtttgactatgtcctttctattcatctctatttcctgggaggtgtttatccaagtgcaataggaggtattggtgaccgcacagtcccctcagtgttctgctagtaaatagttgaaggttgatcattgatcttctgcgttttcagtctggcatggaaaagcccctgtgcaactggtaaagatatcaataagcaccaggaggtatctaaatccaccaggagccataggcatcacgttgacatccatttaccagtcttccctggcaagattcttctgaattgtgctgccttggccaaaagaggtatgggaggggctgggcgcagtggcttgtgcctgtaatcccaacattttgggaaaccaattcaggtggatcgttagaggtcag

SEQ ID NO: 1152 - DNA, 499 bp, Homo sapiens
  source 1..499: mol_type = other DNA
gaaaagccgaggcagggtgatcacgaggtcaggagttcaagaccagcctggcaaacatggtgaagccctgtttctactaaaaatacaaaaattagctaggcatggtggcatgtgctgtagtcccagctactcgggaggctgaggcaggagaatcgcttgaacccgggaggcggaggttgcagtgagccgagattgtgccactgcactccagcctaggtaacagagcaggactccatctcagtcaatcaatcaatcaatcaatctcagcggttgaactacccttgacatggttcagctctgtatccacacccaaatgtcatgtcaaattgtaattcccagtgttgtgggagggacctggtgggaggtgattggctcatgggggccgacttcccccttgctgttctcgtgatattgagtgagcgcttgtgggatctggttgtttaaaagcgtgcagccctcccacttcactctctctgtctctcctgctccaacatggcca

SEQ ID NO: 1153 - DNA, 499 bp, Homo sapiens
  source 1..499: mol_type = other DNA
acagggtctcactcctgtcacccaggctggattgcagtggcgtgatcgcagctcactgcggcctcgacttcccaggctcaagtgattctcccacctcagcttcctaaatagctaggactacagcttcccaagtagctggcacatgccgccacatccagccattttttttttgtgtgtatatatatagatagatagatagatccgccacatccagccatttttttgtgtgtgtatatatagatagagagagagagagagagagagggagatgggggtctcactatgtggcccattctggtctcaaactcctgggttcaagcaatccacctgcctcggcctcccaaagtgctgggattacaggcgtgagccatcacagctggccttcagtatctgcacataaaaagggatctgcatacatataatcttatccttcccctttctgacacatcactgcatattgaatacaccagtgtgcaccctaatcaatcttcattaccag

SEQ ID NO: 1154 - DNA, 499 bp, Homo sapiens
  source 1..499: mol_type = other DNA
tagggttgacagagggttgagcgtggcagcctttccccttgtcctctgtgccctctgggtcatgctcattcccctccacagcccagcccaacaactcggagagggctgcctgggtaggagagacggcagcccccagagctgtcctggactcccttctcatctctccccacaggcaatttctaaaccgggatgacattggcatcatcctcatcaaccagtacatcgcagagatggtgcggcatgccctggacgcccaccagcagtccatccccgctgtcctggagatcccctccaaggagcacccatatgacgccgccaaggactccatcctgcgcagggccaggggcatgttcactgccgaagacctgcgctaggggactcctcatagccctcagcccttccctcgtttccaggcctctccccaggcttgccatcagccttctttactttttgagcctctgatttccaattccctgctccttcccactccattaagagg

SEQ ID NO: 1155 - DNA, 499 bp, Homo sapiens
  source 1..499: mol_type = other DNA
gtggatactcttttattcttatggggaaatggaggcgcacaagttaaatactgaaatgttttagaaaactgtttaacgagaggtaaaatgtgcaattatggctaagctttagtcattaaaataatttggtttattagattaaccagttctctcaaattctaattagtgcaggtttgatggtagagaggtttgtggggtctcatcatccccacttcattgtaatcccttcattgtccgttgtgttgtgttcatcccctctcatcgcgtctctgagatccatgaacctacccaggactctaggctgaaaaagaatcaggaatttatggcgggtatagaggcatgatttgggattggttggatgttatgaggtgaggagcagctgattggagttcatagggatgagatgcatatctccaacaggccactgagttatctttgctactagacatagaaatctaaatgcacagttgaagggagaggggagactagtaatacctgc

SEQ ID NO: 1156 - DNA, 499 bp, Homo sapiens
  source 1..499: mol_type = other DNA
actgtggtatttatgtacctttgaatgacaaacagacgttctgttcctttgagatcatccttttcaattaagtgcgtagatttgggcagcatccatgggcagatatgagggaagaaaaagataacctgtttggccagcatgactagtcaaatcaatgctgaagataaaggaactgatagccagatcacccctgagtccatctgagtcccattcagcatttctttcccactgctcacgggatgcctagcacttgctctcttatttgtatatgtgtgtgttgtgtcacttggactagtttccatgccacctaggtagccatgtgggttcaggtgatgttgctgatattatgaatggcatggacattgcaaacactaagtctcaaaaatgatgaaatgatatttcttgtttgcagtgaagtaggaaaataaattgtgatgactactgttgattgaataccaatgctgctaagtgttttttttatttttgcatttttcatata

SEQ ID NO: 1157 - DNA, 499 bp, Homo sapiens
  source 1..499: mol_type = other DNA
ggcaagataaattaagtattgagaatgccttctagacatcttccccaaccaaatggggaaagttgagtatatttcttacagatgcaggcaaggctttcagtttgacctttgcacatgggattatttcatacttttggtcttgaataaaacattttttaactgctgcaaatgattgtatcctcttgccattctctgtaactcagcatagaaagtttgattaacctaactggtgctcatgttctaaattaaggtcaggttgccaccaggtttcagagctctggttgataaaaggagataaataaataattttatatgctttttatttgagccactagaaatgttaccaaaatgttacatgctactctttcaaattttctcagcttttatgagagtgctcagcaaccttagcctgtacaatgattgggtttattgtggataatgttgtacttatttccatattccaggaatttaccttctaatctgtcttctatggtttcag

SEQ ID NO: 1158 - DNA, 499 bp, Homo sapiens
  source 1..499: mol_type = other DNA
taaagtaaaaattgactatatattttcttccaaaatgtatttccctgccaatggttagcatagtttgagtttcatttcctcatttttaccttcctcctttcatatgcattttattattcattcaactaatcaagatatttctgcaaagatcagctcaaaatgtcttacttttctctaaaagtgtatcttttaccacactccaggacccctagcacttctaaattttccccagatgtgggaggtgtgtgtgtgtgtgtaggtgttggggacagagccttagagtgagcttattacggtggtggtaagggcaaaggtggcatatatttattttcctttctcactgctcaacttcaattgcactggaaaccagaaaagtcagtgttgggaaccatatgattccaagtccctggctggacatcccctcggcttgaggtggtcaccactcacgtgatcccaggctaagatagcacatggaatgtgtgtgttgttgagccaacct

SEQ ID NO: 1159 - DNA, 499 bp, Homo sapiens
  source 1..499: mol_type = other DNA
gtagaccggggcgaggctgcgcgccggcgggaggggagtccactgcggggtgaggttttggggtggggctcgcctgggacctagagctgaatttcctgggctccgcggtgggaggaaggacttgaattttcctggtgggggtgggggatgggtctgactttttttgctccttgtgaacgggcgggggaggtgtggacgggggctgcaagtccaggtcggggtagagaacagggtggtgagcccgcagtcggctcccgtgcttgatggactagaactggagggtccctgcgctcggtttggggacgcatatcctgctttgggggcgggtgagcctgagcatagccgctggtggcccgctcggctgggtgtggctctcgtcccctcccccacctgcagctgtcggtcccttagagacgctgtacacggtcaccggcgctgatcggtggcggggaaggcgctgggtgggagagcggggtgtgtccgcggcggggctggtagt

SEQ ID NO: 1160 - DNA, 499 bp, Homo sapiens
  source 1..499: mol_type = other DNA
cgccccgcggtggcggcgccgggctgaggcggagtctcctcagcggacacgggcggcggctcctcttccgctgggctcgggagggcggctagcggccgcctccggctccttgcttccgcatcgacgccccggcgccgatcggtgctcgctcccccgtcctgcccccgggggtgggtagggcgcccacacgcgagatccctggggatctccctgtcgccggctcccgaaggtggacgaggcatggccggggcgccgccggccgcgatccatccccacccttgtctctgcgggcttccaccccctccctcgccgcccttctcgcttccgcccgagataatgactcggcggcggcggcggcgggcatcgcagtggcgcaggtgaggccgccccctcccctctccctcggccgccccctcctttccctccccctcgcgcagcctccgcgctgggcgctgcggcggcgggacccggccctcccccaccccgggaggcggtggcg

SEQ ID NO: 1161 - DNA, 499 bp, Homo sapiens
  source 1..499: mol_type = other DNA
taattgaagagggagctagtttgcatctcgttcttgcacaccctgagtcatgaaaaacattttcttttaagcaaaattgaaagaaagaaaagagagaaagagggccaaaaaaaaaaaaaaaaaaaaaaaaggttgccatccagtggaggaaggagtaattcccagcttcattcaggaaaaacgcaggctgaaatatgcttaactgttttaacttgactggggatttttaccaccatatgggttttttttcgtgacatccggagccaaacgggtgcagtgtgcctttaagaaaagaggtgcctcactaaacttcgctgtagttgtgtttcaccgtctcggtagggaaggaaagtgttaatttcttatttgtacactttttttccccgacttccttcctattcacttcattaaatctagaggcagttgagcatgggagccgtctgtatgttgaattagggctcgcactcttgcgcaacacgtcaccagtcggaaactgggg

SEQ ID NO: 1162 - DNA, 499 bp, Homo sapiens
  source 1..499: mol_type = other DNA
tcagtactttgtgtgtttccttgtaattccaaaacctaaatttaataagaatctgcacgtattagcagttgtaataaaaattgtttcagttgttctgtttgcaatttaatttgttttcgcttcttagctactcacagatttagagatttaaaagtccaaatatcacaagcttatgctttttccctcttttcaaaattaaggcggggtgagagtagaaatatcctttttacaactccccccaacttcatttatctcagtgagaagaaaaacaatgaaaaattttacagcatgaaactgaaagtgaagtgttacagttgttctgaattttctttaaagagcagaataacatattatgttaaaatatttgaatcttagaacatgtacattgcttttatttacatgcatttaattttcttaaaaaattgtcttctgttttaaaaatcatttagactgctccaaaccatgctgctattttttaaaaaataaggtacaaaatacc

SEQ ID NO: 1163 - DNA, 499 bp, Homo sapiens
  source 1..499: mol_type = other DNA
agtgtggtgactcgggtggtcaacctgcccttggtgagctccacgtatgacctcatgtcctcagcctatctcagtacaaaggaccagtatccctacctgaagtctgtgtgtgagatggcagagaacggtgtgaagaccatcacctccgtggccatgaccagtgctctgcccatcatccagaagctagagccgcaaagtgagttctgatttttcaagatgcaagtcaagggactggtcagtggcgagcccctgagctcacagcagtaacatctggaactcctcagcccttcctggggcatacactgcctttacctagaaactttcaggtgaccctcattaccgtaagaggactgtttcttttcttttctttcctttttttttttttttgagatggagtctcactctatcactcaggctggagttcagtggcgcagtcttggctcactgcaacctctgcctgctgggttcaagtgattctcctgcctcagcctcccgagta

SEQ ID NO: 1164 - DNA, 499 bp, Homo sapiens
  source 1..499: mol_type = other DNA
ctaatttttgtatttttagaagagacggggtttcaccacgttggtcaggctggtcttgaactcctgacatcaagcagtccacccccctcggcctcccaaagtgctgggattacaggcgtgagccaccgcgtccggcttggctagcatttttgttaacagatactcggagaaacaagagaagtatgtcaacaactttacttctccctcctgagtattgcaagtttacacataagctctgaaactttgcctcaaaagagggagtggggttgtgtgggtgtgggtctttcaggagggggacctggagagctggagagaggaaagaagtgcagaagactacagggagctcaccctgcatttttctctacttgtaatcagcatttgcttgggttggggaatgaatttgggagagtcttatcccggtgttctgaaataagtctcttttctgcagatttctttctccaggaagaaaaatggcatccgttgcagttgatccacaacc

SEQ ID NO: 1165 - DNA, 499 bp, Homo sapiens
  source 1..499: mol_type = other DNA
gtggcattctgagcaacagggaagcctttgaaacaggcggttgggtaactgttgagagcattcgggaactgggtggacaggatccgatcctacaaagtgaagggacacaactcccttccctctttcttgattaagcttgacagaacaaaaaaacaaaaacaaaaggtggtggtggttacgcagatttatgccttttacttctaaaagaatcccgttatgtcgacaaattaacagccttatccccgcagggagagccttgtgtggcccacttgccgttttttcctcggtttacttaatgtgttcgtgtggctttgctagagttttaagtagtgatggttaaatttttaaatttttctggaggtggtagtgagtcatcaaactctgaggcctagacttatcggaaggcttgtatatgtgtggtttaaaaaaaaaagaaaagagtaagtgaccgttttctgatcagctattgagctcttccgttcctcctggggggtgatct

SEQ ID NO: 1166 - DNA, 499 bp, Homo sapiens
  source 1..499: mol_type = other DNA
cccgacccaggccgcccgggccgctccggagtcggcctcccagcgcagggcgccaggcccgggccgccccctgactccttgttcccacagagggacccccccgcccgggccctctgtcccggctggacagccccaaacccggcctccgggcccagtctcccctgcccgctgggccgctcccggagcccgggcctcggcgccctgcctggctagccgcccccaccctccagccagcccggggcgcgggctgtgggggtttcttcccgggccggcggcgcgagtcctggcgttgggtcgggtctgaggctcgcggggagcgcctcggcgtttggagctgctggggggtccccgcacgtttttcctctcactggggctcccggaggcgggctgggagctcggggacgaacgggggccgggggtcctcccagaggaaagggggcgcgctggcgtgcgccccagctacaggaagccacagcaccttttccttttctctttccca

SEQ ID NO: 1167 - DNA, 499 bp, Homo sapiens
  source 1..499: mol_type = other DNA
ccctattcaggcaggagctgctcttctggggtatcgcgatccacttaaggatgaggcagacttggtgacaagctggtctgagcaggtatgggagccccctggggagacggaagaagggaggaagttgccttctgcctggggagggtttgagagggagagggaagcctagggctcccaccaaggctgatattgacagccagggtttggggctgaagccaggaaccgtcactctctctggttcttactggtagccctcatgggggtccctgacgccagagcctccaaggctgcatgtgccagcccagggctgcccacatacccatgtatatcccagaataggcaccagggtagggaacccaaactagcatgagtgacagagcaggtggtcagggagaaacagacatcaaacccagccaggagagagacaccgcaacagagagacagagaagggaaaccagagacgagagggaaagtgagacagagacggacagagcctcag

SEQ ID NO: 1168 - DNA, 499 bp, Homo sapiens
  source 1..499: mol_type = other DNA
cctcccttgacttcacgactgtggccagatcatgtgtggactgtccctctctttgggtctccagagcgcttgcatcaaacacccctaactcagaagtgtgcagccacactgggactcagaacccaacaacagggacagaagactcacgcccttggggtgcccggtctcgtggcatcaggcatgacttccagctcctgcgccttccccagcaactgctgactggggacccagaccgggagctgagcgacgggcctggcgagcgaagctcggggtctcactcaggcaccagcccctccttgccccaggcttgagtgactcacaggtctgtcatgtcccgctggcccgggaaggcggggtctgggtgggaaggtgggcgggcaggtcagcagttcccaggcctggtgctggtcctccttgttggcggcgaggcggagacggggcgggcctgcctgttggcaagggtggggcgtccggcccagccaggcccttcctggccggg

SEQ ID NO: 1169 - DNA, 499 bp, Homo sapiens
  source 1..499: mol_type = other DNA
gtacacacagcatccagtctcagctgtgtccacgggagtccaggttggcagcgggcagacggtgaacaaagtccaggctggatctacaccattgacctcatgaagcaccatgaggatgaaggatggggctgtggatggggctgtgaatgagctgtgaatggggctgtgaatggggctgtgaatgtagctgtggatggggcagtgtgagtccctatgtgtcccaggcagggttgagactgtgcaggaatctgtcgaccacacaccgaagaggaaattcaagccgggcgtggtggctcacgcctgtaatcccatcactttgggaggccgaggcgggcggatcacaaggtcaagaaatcaagaccatcctggccaacatggtgaaaccccgtctctattaaaagtacaaaaattagctgggcgtagtggcacacgcctgtaatcccagctacttgggagtcagaggttgcagtgagccgggattgtgccactgcactccagc

SEQ ID NO: 1170 - DNA, 499 bp, Homo sapiens
  source 1..499: mol_type = other DNA
tctcagtaaggaaacttggtcaaaggtattccagcagtcttcctgtgaaaccatgctcactgatcaccaccctcaaagtgcagcccagcttcctcagcccagctggtgcagccacccagcccacagccccaccacctcctcccgccaccccatggcatctcaggtcctctgtgggtacaaaactgagtaggaaccagtccctctcctaagacatactgggatagtgccacgggacatgtgtgtgcacatctgcaggaagggccgcaggagcggtcagggccagccccgccaggtggtcatgtggaagaccctcaccaagcccacagccgtggaggctggaggcgagtgctgctctgagagcccatgacaaacccactccccccgccaggctgtcttctgctgatgacggatgatggttttacatgaagcatctgcatttgtatttaatatattcacttttcaggaataaagagggatgttcccacatgcattttttcca

SEQ ID NO: 1171 - DNA, 499 bp, Homo sapiens
  source 1..499: mol_type = other DNA
atgttgctttagtttctaagcaacataaatagctattcttaagcattgggttgaatggatagaagaattagactgttaaaatgagttgtaaactctactgaagataattcaggtaacatcatagttattacttaatactaatctttacattttaagaatttactcctatcattcagtagatgtacaaactatacatccaacgtataataaagtttataaggataggtcagagccaaaggaatcatgagaaggaagagaatatgtttgccagtggtcataaattttgaagcagtaggaaaatatctaaatactagatggcacaaagtaataagatttgctcaagcattcattcaaaatcacctccattctttaacctctgcagctttggtccacttttcatcgaccagagttggtccgaccagccttggaaaactcactgaagaaagctcaattggactatgttgacctctatcttattcattctccaatgtctctaaag

SEQ ID NO: 1172 - DNA, 499 bp, Homo sapiens
  source 1..499: mol_type = other DNA
aagacatggctacatttaaggatatgaaatagtctacaaaaatgtatcatttgtctattcttatctctaaactccaacacttttttttattattgttgacccaaactttttcattggtggcgattatggctttggagcagctcaaggctcatggtcatcaccataagacaactcctctgggtctcccaacttctgctgaccctatgtgattcacagtcctgcccaaagactatcaactcttcaggtggtctgataatcctaccgtgtacaagagtacaatccattatttttggatatcaaggtatttccaaatcaaagagaggtacttcaatagaggaaattataagggcggaataaagtgacataagtcaactgtgaaacttgattaagacctagaaaatggtccttttccatgcatataatatttgtaagagattagaggaagcctgtctcctgaatacattccttataccttcatatgtaaaacacttagcacata

SEQ ID NO: 1173 - DNA, 499 bp, Homo sapiens
  source 1..499: mol_type = other DNA
gtaagtctcttgtaaccatctgatgtagtgatacttgaatattaagctctgttgtattggtttgatgagtacaaccttgagattacagatggttagcatagttatgtgcttttttgtctttgttttttaatcttaatcaaaataaaagcaactaaggaatcagattactgactctaagcttttaaaaaggagtgatttttttaatcagtgtccctcagtcagctagtgctatgccagcctgacttctcagctgcacctgttacattctccaaccctatgtgacttgcttttcaaattgttgagttgctaatgggaattttggattgtttgggggcatgcagatccataggaaatggtaatgaagaataagcagctcatgagagtgatggctcaagctgccatcatttaacttgaacttcttactgtcttgactttatgtttccgaaatgatgagccagatacattttaaataaaatttttagaattagagttaattcca

SEQ ID NO: 1174 - DNA, 499 bp, Homo sapiens
  source 1..499: mol_type = other DNA
tttcactttgatttaggtgttactgctgcagaaagttttatttttgtttaagtataggtttgagttaatttaaggtttattttctgtgaaaaactactttgaaatgttaaaaaggcaactttacaagatttgtgtcttgagggacactcagcttggttttcattattatccttttaggatacagatgagtttattttacctaccggagctaataaaacccggggcagatttgagctggccttctttacgattggaggatgttgcatgacaggtgagtgttacatacttttttctcaagagtgctcagttcaagtagttgagggtgcgtaaaatcaaaagcaattagaatgttggtttcagggttttttttttaatatttacatttgtctttttctattaaataaaaatgaaaaagaatcagaagtgtagttatgcagatttgagtttgtttttttaatataaagctgtctttatctgggtgaattgttatgatttacca

SEQ ID NO: 1175 - DNA, 499 bp, Homo sapiens
  source 1..499: mol_type = other DNA
agtaaaggaagctttgttgtgttttaatgcaaaccacacagtaaagctttaatttaatcaccttaaaattaggggaacaaacaggaagtgttgtaataattgattgttttttcgtatttaccttaataaatgccttgaccatagtcccagtttggtaccagataaagatatttatacatgtaatatgcatcctgtgtatagatatcttatgtattccatatgctttattcttgagaatttcttcactcttattttcatttagactaaggagaaatcaagaaagcctatttccttagtcatcttagtcattatccacccccaccagccctgcaggctaagaacatcgtgcagactgagttattaaagttgatctgaaagagcaatctgttctaaatgactgtccctggatctgcaacggaaccctgtaaatacccttcattactctggcggggcagtatcacatttccttcatggcacttttgtgtctgacacaagttag

SEQ ID NO: 1176 - DNA, 499 bp, Homo sapiens
  source 1..499: mol_type = other DNA
taaccacaaatttacttctcaggataatgttttaaagtgggtgttctgtttagtttttaaaaatgtttttagtttttaaaactaagtgggttttgaacttttagtttttttttttaatgtttttagttttcccaggcaagcattttcagtagtttagatgaaaaagaaatttcttagtgatttcattgtctttttcaattatattgttgtcatgccttttatataagatcttttataatccaccacccatctattgttttggatagtcaagaacttgtctttgctgtgaaaatttttctcattaaaaatggctaaaaaatacatactttctctgtttttcaaaaatacggcatagaggttttgtttagttttttcatctgatactggatatgtcaagatgaatctatgaacttcaagcaaaacttattgaagctttggtatatgtgagtaatttgttttagagaactggagcctatagcgatataaaaaaatagcaaat

SEQ ID NO: 1177 - DNA, 499 bp, Homo sapiens
  source 1..499: mol_type = other DNA
ccaccctccagcaccgccagaggccccaggggagggcggctgtgcccacggggcttgtgctctacccaggtgcagcaggtgtggggcgaccagtccaagccagccgggcaaatccgagctccttctcgggggttctgggcaggccacctgttccacctgagcttccacgagctcccctccgacagaggcagggcgattacactccctcccagagctgtccccagggggtccaggcatgagggacagccctgacctcacccttggggctctcccagaggggctggccctgagacgggcttcacggcacaggacccaggtccttcccatgctgtgttcccagagctgaatcagggacccactggctttggatagatgcggccacagcgggcccccaggggctccagagcctggagggccatcaccaggccaagctagcccacagccgggcctcgatgccccagccgcccatccagccttgtaaccatcttggtctttctag

SEQ ID NO: 1178 - DNA, 499 bp, Homo sapiens
  source 1..499: mol_type = other DNA
taagtagccgggtccgccctgggccaggcccgtgggtgtgcgttgcacggtgaggtgaacctctcgcatggcaaaaacctggatcgctcaggatgctggcggcagggggcctggagccttcctcctgcccccgctctcccctcgtgcctgcagccgggggcttcccagtggccgctgccctgttggcaagcgaggaagggcccccaccttcccaggagctccgcctcaagccagcagcggccacagagtgcccctgggcacaggcacgagggcgggagcggctggcccaggagcagcagggccgttcggagctctgagctcagcggctgaagggagctggagctgagaaggaggggtccgcaggcctcacctgcaacccctccccagccccatccgtgctccgtaccccccgccccacatcctgccgcaggctgaaggtaagtggccagctacgggctgctgtgtgtggcagtccaggccagtacaggctggcgagagt

SEQ ID NO: 1179 - DNA, 499 bp, Homo sapiens
  source 1..499: mol_type = other DNA
gctagaagggggagccccggctgtcagcctgggcgcagctgcctccccagcccttcctcttcagggcacggtcggggtgagaggtggggggcgtagcggtgtgcgggggctgagggcgtgagcagaggggtcggggatccggaggctttgtaccgccaggggctggcggagcaacagagcccgtgggtgctcttatgtatgcggaccggtgcgcgggcgcaagataaggttgtggtttatttatttgtgtgtttattcgccggccggctgggaagctagaatcggaggagctgacgagtagatctgggggcggaggggagcaggactgggactgcttacgttttgtttctctttgagaaaacgtggtgggctttttcttgattggacttgatccccaccccccttttgcaggggagggagggaagctccagagggtctgcagcgctgcgggccctcctcggctctcggcgggaccggcggtgacaccggagctcgccgt

SEQ ID NO: 1180 - DNA, 499 bp, Homo sapiens
  source 1..499: mol_type = other DNA
tgggtgccggtctctgcacctgatgcgttcgggatgcctttcccaccctggcgcgcccgccgctagctcgcacagcgcctcgcacactcccgcacgcgcttgaaatgcgcacggtcccgccggcccgcggaaccacccggacgcacggagcgctccgcaccgactcgctcgccgcctccccgagacgctcgcaccgtgcttgggccgggcgcgctggccgctggcgccgctggccagaggcctgggacccagccggtcgctcccagggggtcacggccctgggtcggagagggagggcgggcagaccccttctcgcctttcctcccacaactcgctgcggggcttttgtgcttccccttcgccgcggggcgggtccgcctcccctgccgctctcgccgcggagtccagcccgcccggactgtcgccgttcctccccgtctctttcgctttccctcgtccctagctcagctctccttctttcaggagtctagctcctcgg

SEQ ID NO: 1181 - DNA, 499 bp, Homo sapiens
  source 1..499: mol_type = other DNA
gtgagtctgggcctctgaccactgggtgtggggggctgggaagccattacagctgaagaagagtgcttaaattgatctcatttgtgtgtgactcattttttgctggccagcacctgcagtccccaataccaatacccccctaatcctggggtacattccttgcctgaaactagaaaactgtctagtttgctctagcgcccccctactctagagagggtgacaagtccttttaacattgggttttcttcactccctccctcagctacagcggctaaagcagttactcaggaagggttctacagggacaaaggagatggaacttcccccagagccccaggccaatggggaggcagtgggagctgggggtgggcccatctactacatctatgaggaagaggaagaggaagaagaggaggaggaggagccacccccagaacctcctaagctggtcaacgataagccccacaaattcaaagatcacttcttcaagaagccaaag

SEQ ID NO: 1182 - DNA, 499 bp, Homo sapiens
  source 1..499: mol_type = other DNA
gattacaggcatgcaccaccacacccggccatgttaagcttttttctagacctccatgaaatctgttaataaaacctgccaaaggatctgtatttggcccagtgcagtggctcacgcctgtctcaacaatttgggaggttgaaacaggaagattgcttgagctagttcgggaccagcctaggcaacaaagcaagaccatgtctctacaaaaaataaaaaagtagccaggtagtgtgcaccttgtgttccagctactcaggaagctgaggtagggggatcgcttcaggctgggaggtcgaggctgcagtgagccatgatcacgccactgcactccagcctgggtgacagagtgagaccccatctcaacagtaacaacagcaaaatctctcatcacatttctccgaaagcctcccctttgaggaccaccctactgcaagggacagaaagggagagaagaatgaaagggattagatttcatagtggggtccaacctcttgca

SEQ ID NO: 1183 - DNA, 499 bp, Homo sapiens
  source 1..499: mol_type = other DNA
gtaagtgcatttttaaaaaatctctaatattttccagcctgagcaacatagtgagaccttgtctctataaaaaaaaaaaaagaaataaaataatttaaagtagccaactgtgatgtcacctgtagtcctagctacttggggaggctgcagttggaggattgcttgagcccaggggttcaaggctgcagtgagctgtgattgtgccattgcactccagcctgggtgacaaagtgaagccctgtctcaagaaaaataattaattaattcacgaaaattaaaataaatatctccaatatctaggaaatgaacagatagatcactgttctaatctttttaccttttttggcatttttttctacctaggcttagtatgtaagtcagtctctgttcagtggttttaacacagcaatcacccctaagtataatgagctttaaataaatgagttgaggcctgaagtaaatcaggtacagttctataataatttcattaagtctgagc

SEQ ID NO: 1184 - DNA, 499 bp, Homo sapiens
  source 1..499: mol_type = other DNA
tgagcagtatagacttcttgttatgtttttccaaacaaagaaatgaacaagaaaccagggcatataagaagtgatgtcaagtaaaaatgtgtttacagggttaacagaatgaaaagcggaatcttcaccttcctgtaatatttggggttaagtaggtgctatcaggtaaaacaacaccacaattgtgagcaaagaataaaaagatggctcccctccctccagctaagaggcaactccactctagagtgtgtggtttgatcccggagtgtgggaggcttcaagccccacttatcctcatcgccaagtgctctcgagtagtaaacaacagatacaactctctgtggcagctgtggtcatggcaagtatgaactacagacatttgtatattcactcatttagactgtgtcctagcccaatctaactctcatctgcccaaaaaaacttctcctttttatttaatttacatctgagttattctaacaatataacaatgatttta

SEQ ID NO: 1185 - DNA, 499 bp, Homo sapiens
  source 1..499: mol_type = other DNA
atcttgacttttgtttcttaaatactgagagcaattaatcatgaggttttctgggtagaaatgagttctcagatagtacatatataggcttttatgtctgtgtccaaacgaatgtgatatatgaataaggtctgccattcactttagttacaaaatcaggacttgaaaaccacttccattattgatttcatcaaggtttgatttttagcattcattttttcctaacctacagtcacataaaaaatttgcagtgttccatttttaaatctgtgcttccatttggattaccctactctgtcaactttttatttattattttttctttctttgcctgaaaaactcaggtttcacttttcaggtaccaagttttctaaggcttgctcagcagttgaaagtgtattgtgtggtttctcatcttctttttcagatttctcttttctcaggttacttgggatgaagtcttttctccttgactttttactcctatttcttgtttcag

SEQ ID NO: 1186 - DNA, 499 bp, Homo sapiens
  source 1..499: mol_type = other DNA
ttgggataatttctacccttttccctgcttttaaatatattattcattgacggtagaggaaaagaaaaggcagtgagcctccttgctgagtcagtgcacagagcaggggcaacagttttcgcctgtgctggcaccaagaaggaaatgttggctttaatgacaattttttgttttacgtgagaaacttcttagaaagaggcattctttgagaaataaataagattggtaaatcttgggtataaatgttaggggtcaacatatctgtcttccatttctcactatatatccacccttttccctgttctttaaatttagatatttggattttaaaatttttcttttcttttttgagactgagtctctctctattgcccaggctggagtgcagtggtgctatctcggctcactgcaacctgtgcctcccaggttcaagtgattctcgtgcctcagcctcctgagtagctgggattacaggtgtgtgccaccaagctgggctaat

SEQ ID NO: 1187 - DNA, 499 bp, Homo sapiens
  source 1..499: mol_type = other DNA
gtagccgttgccattgtaatgaaagctcctcttccccaccctgcactagcccgaagaatgcagatcaaggattgttgggctttgattaggcgacagttattcgaagccaggaacacggtattttaaagtgttggataaagaagttaggaaaatttgcagagatagcaccgcaaacattttcttagtctctaagttatttttgaagatggagtatagcattttagccttttagagtatgcatttataatgctaggaatatgaatttgacttttaaagtatatcttagccccatttctgtttcaagtgctgctgtgctgttgtagccaataaactatttgtaggcaaataatttataacacacttcccagaataggagtactaaaactagagtatttttaggccaggagttacccaagtccatacaaaatgtaagaaagggatgaggtaagaaataattagaatacaggggctgaaagaggtgtccattgactgctgtctg

SEQ ID NO: 1188 - DNA, 499 bp, Homo sapiens
  source 1..499: mol_type = other DNA
ggttgggattgaggagccgcgcagcgggatgctgtgccccgccccgctccagtctggaagagcccacgtgtcactgttagatgggggaagcggcatcctaaatttaattagcgcttctcttctcaaagtatctcccaaatctttggcctttttccataaaataattttcttttagctcaatgtctcctaagatatatgttgaattaagaaaaaatatgagtcacataaagatgcttttttcagcttcccctgctacgtccgccccatgcgccaggccgctaggggcaggacgtggaagcggaagcgctggtctgggggcgttctctcgagtccgggccgcaagtcccagacgctgcccatggaggcgtccagcgagccgccgctggatgctaagtccgatgtgagttccaacctggaaggagagtgggcagcgaggctctggagcaagaaagatgtttctctaaattgtgtttctgcttccgtttcaggtcaccaacca

SEQ ID NO: 1189 - DNA, 499 bp, Homo sapiens
  source 1..499: mol_type = other DNA
atcaacctgctgttccccatcatctacttgctgttctgggccttcctgctggtcttcagcctgtggtcagagccggtggtgtgtggcattggcctggccatcatgctgacaggagtgcctgtctatttcctgggtgtttactggcaacacaagcccaagtgtttcagtgacttcattggtgagttgttggaggctctggctggcttcagggcctcctgggctggaatgcagtggtcagtgatggggttggggagccaccagggccaggagatctaggctcaccttctcctcagtccacagagccctggaagagtccagagcaggggaagcagatgccttttcccagagacctctgagggtagagaacagctggcatttccacacagaccttagacccgcaagaataggcaacctgggctgggcacagtggctcacgcctgtaatcccagcactttgggaggctgagacagaggatcacttgagcccaggaggttgagac

SEQ ID NO: 1190 - DNA, 499 bp, Homo sapiens
  source 1..499: mol_type = other DNA
aaaatctgctagagggaagaggaggtagaataaccccatgtccccaccacacacatcccttctgagcgaggaagacaaggaagagaaaggcagccgaatcaggactgcccctggagccctgaagaggatactctcaggaactccccacatgtggcccataaggagctgacatttgccatattgtgcccacataagggccctgcacagaagtgggcaaggaccagggagcctgagtgactcgaatcgtctcctgcctgcaccttgtgcattgccacacctcccctccaccctaggacctcagcagacacacccatgtgccagcaagcttctccatccctgtgggcttctctggctgccacgggcacatggcatgcatgatgaggccttgtctaaccacacccaagagcgaggacatgggcaaggaggatcgtttcctccctaactcctccccatcctcttcctgtctgaccgaccatgttcatcaacatttgtttatata

SEQ ID NO: 1191 - DNA, 499 bp, Homo sapiens
  source 1..499: mol_type = other DNA
tcctgactccagactcttcttcactgccctgaggacccggggatggggtctggactaggggaggtggaaatgcaggggagtgggggcaaattcaaaggcctggcctaggaggccttcgtggagcagcactgaaaacccctttcacttcccccaaaccagccaaatgcagcagaggcgacacctctcctcccagccttctccctggtccagccaggatttaaaggagatttagggagacccctaaagttcacctagagcaccctgagcccatctactgtggacctgcaccccagcttccgtcaaccctgccccacccaccaccatggatactgcccagggctgggcaaagggcagcggttcggggtgtgggtgctggccagtgccctttctgagcccgcagaagtgtgaaccactgggccaggtgaggcaatggctgcctaagtgccagtcccaggcgagtctctgagagtacacaaggattcacagctgtagcctgcat

SEQ ID NO: 1192 - DNA, 499 bp, Homo sapiens
  source 1..499: mol_type = other DNA
ctcctgaccttgtgatccactcgcctcagcctcccaaagtacgggattacaggcgtgagccaccactcccagctcagctctaagtttcagtggttctgggaatttcagccttagggaggggtgccaccctagaagaccctaatttatatacaaccagtatatcccagtttccccccaactgctagtttccagttcccttccacctaattttgtcctgcaatcttgtaactcaaacctaaaatggacatcccagagaacccgggcctggctttgttctcgcccaggcaacttccctctgaccaaccccagaaccctaccctccagaacttgccccccgaacatcgatccctggaaacacatgtgctgctgccacaggggcttccacctgcccacaaagcaggccccccaccatcagacccctctcacctttgttcccatgccctgtccctgcccaataccatctctccaaggactgattggactttgtttcctttcaaaa

SEQ ID NO: 1193 - DNA, 499 bp, Homo sapiens
  source 1..499: mol_type = other DNA
acggcatgcactgcggcgcccagccggtcaccgcctgccggctgcagacgcctgcgagcaggttgtttttataagaggcgtcattggcgcccgagctgtgaccgccgccactggggcagccagcacaatcgggcggaggtggcgctgccccttcaggtactgtactaggcgggcttagaccccgggagggggtttgtgccgactgtctgagtccctggccgacacgctcggctcagtagaggagcagtggcggggtccgcctcctaggctggggctgctcgggcggggacttgacgcctggtgtcagcggccgcacgggcgacctcctcgggccgtgcgcgagtgcacagctccggaggcccgagccgaccctggggcgtccggtccggtggtcttgcagcctccaaaccccgagtgctataccgaactgcgcgccaagggtgggagagctgacggcctgggccacccttcttccttcactgggcaggctttgaggtgc

SEQ ID NO: 1194 - DNA, 499 bp, Homo sapiens
  source 1..499: mol_type = other DNA
cagtagggtatgaatgcatacaatctcgatggtctttacaccttcagaggctattcggacttaaggaaacgtgcatttacaagtgtaaatgtaaaagctcagtagttgccttgtaaagtgcttttcggggttgtggggttgggggtggtaggagtaggtggtgcctcaaattatactagcgaataccaacattcccaaacatctagccctctgcctaaactcacccggttgcggtctgtcattttcgctcttctttgttaattttttcggcaaagtcagttttcatgcagcagatggcaagaaagccggtgaacgcctagggacgtggccttttaaccgcacccaattaaagcagcaaacagaagatgaatagctgggtggatcagtatgtgtaaacctatccgtttaatccggggagctgttttcccgggtgaaaccacgaattctttctggaggttgcaactcgtaaccatagcaactggaagtggtcgccggctcc

SEQ ID NO: 1195 - DNA, 499 bp, Homo sapiens
  source 1..499: mol_type = other DNA
gatttcataaggacctgtgttcaggtcgtggtggaaagacaggagggggcacgtgagaccttgcagaggtggaatccacaggactgatcgatgctggaggagcggggcggggcatccaaagtgatgccggggtgtgcatgggagactggaggaagacgtggttcaccaaaatgggggcatctggaggggaggagatggcaccggggtaagggtggggggcttctagaagcttgagtcagtgaccttttaacgagggaagtaagtctctagacttttctgttgtttgacactcagcagtgtgttgggaacacaacagagaagacagatgtgggtaaagtgagagggagcctggctggcacacaggaccggggcactgagtgttgggaggtgggcggcaggagcagacatggtaggtggtggccggcgcagcagaaggagtctttgtggctctggcacaggagcaccttcgagcaccttcttcttgttctttgttttctag

SEQ ID NO: 1196 - DNA, 499 bp, Homo sapiens
  source 1..499: mol_type = other DNA
tgggctgacacagcagccccaggctgatggccagcgctctttttggatcacagagagaaatggagaggaactgatgactatatgagaacatggcagcttttggtccaagtattctggtgtacatgtaaggatacactgttgtttttggcttatcttctgtttgtgtgtttttgttttacagttaaaacaaaagctgatggctcattccgccttgagaacataaccacagggacatacaccatccatgctcagaaagagcacctctactttgaaacggtcaccatcaaaattgcaccgaacacacctcagctggctgacattattgcaacagggtaagcttatcgtgtggatttggaagcgccagtaaatatgctggcagccagtgtagaaccgaatgacctgtgatctgtgtgtctttgccgagcttaagaacttaagaaagattagtacttttttttttttttttttgagagacagagtcttgccctgttgcccaggc

SEQ ID NO: 1197 - DNA, 499 bp, Homo sapiens
  source 1..499: mol_type = other DNA
gtgagacttggaatgtgttttctttggggacttttttttcatcctgtgtccagaagtatcttgtggtggccccaagactgctaggagtgggttgggcgagagggctgggggtggggctctggagccctcccagttcttacctttaattggtagagtttgccttttttctagccaacaggtcagatcaaggatctgtggcacaatggagttggaaaaccatgggtttggtagggcttttccctagcagtatgtggccatggcttacgccagggctcaagccaaacgcctatggagccagaagagcagtatgaacgggggagaggaggctgtgcgaaatgatagggagtggtgagggctgtggagtgggcacggcctgtggaaagggacagcctgtcacttggttccagcttattgtagccatgggggaagacagagtcagggttgccagatccttgaaattttaaaaagagaagtcagaaattcccacttcccagaaata

SEQ ID NO: 1198 - DNA, 499 bp, Homo sapiens
  source 1..499: mol_type = other DNA
aaaaaagatacacatctatagatagagagatgcatacatatatacatgtatacacacagatacacacatatgtgtattttttgtagacttatacagaatcactttagaggaagagtaattggaaagattgggtttagaaaaatggaccattttctactgaatatatggaatgaaagaggaagtgagttatttccatgttattgaaagctccattatttcaaataaagcctagaaagaataaaataaagctttagccttcttaaattacaattttccagagcatccctcaaaatgtatgagaaaagaaattgatggcagcttatccctccggcaggaaggtgtggtttgaaagtgggccggccacaccgagttgcctgggtcattgaggcacagttctcccctgaactattttgccccataattgttggtaaacgggaaacacttgggtccttcagataaccatgagaatatctcattcgtgcctgttcttgccatacta

SEQ ID NO: 1199 - DNA, 499 bp, Homo sapiens
  source 1..499: mol_type = other DNA
ctcccaaagtgctggggttacaggtgtgagccaccacgcctggcccaaagaccccttttccaagtaaggtaacatttacaggctccagggattaggatctggtatctttgcggaccattattgtttgtttgtttaatagagacagagtctcactcttgttgcccaggctggagtgtggtagcacaatcataactcactgtaatctcgaactcctggattcaaacaatcctcttgtcccagcctcctgggtaactggtaccacaggcaatcaccaccacacccagctaatttttaaatattttcagaggagtctcactgtgttttccaggctggtctcaaactcctggcctcaagtgatcctcccgcctcagcctcccaaagtgctaggattataggtgtgcaccaacgtgcccagctgggggctactatttagccccttgcaggttccctcacaccctccccttgcaggttccctcacaccctccctccctccccacag

SEQ ID NO: 1200 - DNA, 499 bp, Homo sapiens
  source 1..499: mol_type = other DNA
tcaggagcagtgtgggcagcgcgctcagtcagaaggctgcctgtgggggttaaatgggccctccaaagatagaggtctcccttcatcactgctggcttctcatctgggcctgcaaaatgctcaaagggcagtagaacgccatcctgtctgccatgaacgggatcagagaggacccttgtgccccagccagacagctcactctgaccaccatccacgcaccaggcactgccacacatcgtctctcatccctcacaatagcccattcagaggatggtctcattatcttcatttttttaattaaaaaaaattattattattttgagacagagtctcactctgtcgcccaggctggagtgcagtggtgtgatcttggctcactgcaacctctgcctcccgggttcaagcgattcatctgcctcagcctccctagtagctgggactacaggtgcctgccaccacgcctggctaatttttttgcatttgtaatagagacagggtt

SEQ ID NO: 1201 - DNA, 499 bp, Homo sapiens
  source 1..499: mol_type = other DNA
ggactcttggccggctggacggcagctcctctggagggccagaaaagagaggggctagtgctcgggcaggtgccctggcttcccttcccctccacacgtcaacgattctatttgaagttgggcaggggggtggcgctgctcaccacacacaagtgttataggaggagtctggcccttgagtaccgggtacgcaggggtgcctcaaccacactccgtccacggactctccgttattttaggaggtgagtgtagtgccagtatctactctccttcttaaaaaaaaccagggctccagagaatcagaacagccaccatcaccgcagggagtcaagggaggagggagattagagaaggagccagggagggtggcagggaggccacgtgatccgagtcccctcacccctttccttcccacaggtccctggccaaagatttatttctcttgacaaccaagggcctccgtctggatttccaaggaagaatttcctctgaagcaccg

SEQ ID NO: 1202 - DNA, 499 bp, Homo sapiens
  source 1..499: mol_type = other DNA
tgggccccttgcaggaccgggccggggtggggatggggttggggttgggccaacagggtccagatggggtccaggtgaggaggggagatttggacgataggagcagggggctcagcatctgggaggcagatcagttcggggacggattttcttttggagaaggaagtcaggctcaaggaagacgtttggcaggaactgtgaccccgcatgccagaggccgagcagcggccggtgcatagccgcgcattctggttttctgtggcgcagaggactaccagcctggctgcggcggcccggcggagagcgcgcacgcatgcgcgacccagcccggcctgccagcctggaactcggatggggaggtctcgcctccgcgcgccgctagttccgccgccttctcgcgctccctgcgtgtcctctcgatgccctttcctccgcctcccttacgcctgggccagtgacagggtgtcggctccgcgccgattcagcccgcgggcgaggc

SEQ ID NO: 1203 - DNA, 499 bp, Homo sapiens
  source 1..499: mol_type = other DNA
tcagctgggttttaggtacccaaaaagggcctgtctagattttttcagaaaaacgtggagtgctaggggcagcctggaaaagatggggaacctgctagtgaactaggagggagacttccatagcctcagacttggatagggtaggctgagggggccctaagggagggactaaggctccaaggcaggtcacttttccttaggctgttctacttctggcttgttgcaagaggagtagatgccccctcacccacacaaaccccactcagtctccacccaactcctggcactgctcccaggggatcgggtctccactccagctttctcaattaaagacgatttatacaactgaagtgctgtctgtcatctgtcggtggcgggcttggcagttgctcgaggcaggatcaagtcccgggggcggggcgggtgggctggcggctgtcctccagcaacaggtgcacattcccgggctcctcgtcacttcccctgtgctggcggtccc

SEQ ID NO: 1204 - DNA, 499 bp, Homo sapiens
  source 1..499: mol_type = other DNA
taagtgtaggccccgaaggggcagtgacggggccagcggtcgtggccaggcaccagggctgcacttattctctcctcccccaggcgtccgcggctcggaggcggagggtcgactccgggagaaacttttctctggctatgatagctccgtgcggccagcgcgggaggtgggagaccgtgtcagggtcagcgttggtctcatcctggcgcaactcatcagcctggtgagggcgcgcggggggtggaggtcaggccagccgaccggccgggggcgtggctttaggcaaggccggaccagggacaggctgggggcggggcctgggacgagaccaggctgagatggaccagcctttggtgaagattggatcgaaatcagaccaatggacaagctctggccgtgggtggtggacgggcctggagtagaactgggtagggtgaaggacggacctgtgatcggaccttaaagtggggctggggacgaggcaggggctgggggacgg

SEQ ID NO: 1205 - DNA, 499 bp, Homo sapiens
  source 1..499: mol_type = other DNA
gtaagctggctttgctcccacctgtgcccatttctgcccccagggactggcaggatggcagggtggcagggcggcagggcgctgtgtgggcaaacctgctcggtgggaggggatcgatcctgtgttctctcccagcttctatcattaaccagcaagtttcccatcttttggaggctgcagattcctgataaatgagggtggtggaatatctagggttgcaaactcacagcctaagggctaaaactggtctgcagatgtgatttgttttggcttcatggggtttccagaaattttgaaaattcaaagcctttagctggggcaatgtactggttgtgagcccagactcaggagctgggttcagttcctggctccagcaatgactagctggttacttcacttctctgccttaaacttctcatctgtaaggcgaggataacagcagtctctacctcatgctgccattgtgaggaataaacgagttcatagatggatagcactt

SEQ ID NO: 1206 - DNA, 499 bp, Homo sapiens
  source 1..499: mol_type = other DNA
aggatgtttgtgctgaaaatcccaggtttggatccctcgtgctcagtcccaaactgcagaggaaacctctaatactcaggcaagccaggagagctttggcaagagccctgaaatcagacccggccagcatgtgttcctgaatatcagaatagacactatatttaccctgacagccttttagtgcaactgaaagctataaataaccattagggcccaagcaagtggccttaacacatggattttcttccaaaaatgcagacccattttaattaagtttgtaattaaccactggggagggcaggccccctggattcggtctgctttcggagacactgtgagtaacttcctatttgttgaacatttggggattagcacgcccactgggtgttcagcttggaggcttgcacagagctgagctccctgcagccttgggcctccccctgccctgggagtcctgatcagcgtctctttgcaaagccaatccccttttactccgttg

SEQ ID NO: 1207 - DNA, 499 bp, Homo sapiens
  source 1..499: mol_type = other DNA
gtgctgggattacaggcgtgagccaccacgcctggccacaacaaagaattttaccagaagtgggtatgatttatatcttagtttgaattgctacttacctttgggggaacagacctttccttgatgtatctttaacactgaaatcttggcaagttgccaagtctcaaatgttcatgagtaagactgcaatatcacaatatcatagtcacacaggaatctgatagaaaagcatcacatttataaagccttctttcctgtacatcactgacgttttgtgaattttaaagaatttgtaattatttttaaggagcatatttaatgtagataatgtagcctagaataggctcatttgaaatgaaactcttgctaataggaacttaattcaccaaattaagaatattttgcttttgtagagattttgctcttgaaaatgttgcagtcttgatttcgtcttgtcagtccagtcagaattgtaaagtaattttttttctcattccag

SEQ ID NO: 1208 - DNA, 499 bp, Homo sapiens
  source 1..499: mol_type = other DNA
taagagacatagcttttgtaaaatctcgtgatgaatatagtgacatctgacttcctccagagaaatttattgtatgccatttttcccctcattgttattagcagattaagtattaagagctttttttttttttttcctttgagacggagtcttactctattgcccaggctggagagtagtggcatgatcttggctcactacaacctccaccttccaggttcaagcgattctcctgcgtcggcctcccgagtagctgggattacaggtgcctaccaccacaccggctaatttttttgtatttttagtagagacaaggtttcgccatgttggccaggctggtcttgaactcctgatctcaagcgatctgcccaccctggcctcccaaagtggtaggattacaggcaggagccaccgcgcccagccgtattaagagctttttaaagaggtttgttgcaacttttgggccaccagcatttccttctgcggaagttgggctacg

SEQ ID NO: 1209 - DNA, 499 bp, Homo sapiens
  source 1..499: mol_type = other DNA
ggcctgagggcggcggtgcagcgggagggagaaagagggagggaagggaagttaggttgcgcggcgctgcgtgttcagcaggggtgggggcgggggagtcgggcctaggggccatgtggaagctccgggcccggccgcccgccctgtctgaccccggccggcttctccttcctatcccgtggcccctgtggctctccccacctatttcctagagctctgccctttcctagctaccttggtctgtactcatggccaggcctggcacccgactgcctcttaacccatttccactgatatttttccctctttgctcggttattcctctcttggggttttttctttttctttctttcttttttttttttcttctgacctggatgaatagagacctaatcactagggatctgcacccagaaaacagactgaggctcatctttgagatggggcctgtttgctgatgaaatcacaggggaaagttcctcgtttttcatattttaaa

SEQ ID NO: 1210 - DNA, 499 bp, Homo sapiens
  source 1..499: mol_type = other DNA
taataggaattaagtctgagtaacactaaccatatgtgttcctttgtgttatataggcaaaatgtcaacatcaacaaagtgacaaggcttattttatacagactgcctttgaatgatttttttgttgtttttcatatgtgccaatttttacaactaacctgtttatcctttcctagaagagatttttccactagtataggctgataattccatttagggtattattcctgtttctgcttttgcaaattttgcaaaaagctttttatcttattcctaacattcttaacattctttagtggtacataattaataaaacttttaagaattatcttctgctgtgattgcagagcttgttagcagtaagaaaaatgtgtctgcttttgacttttcctgctaactttgctgtttgggcacggtttttggtggagaggtgtgtgtgtgctaaatttttaaacaaagggagtagtttttgaggcctgtggattacaaaaggttacaa

SEQ ID NO: 1211 - DNA, 499 bp, Homo sapiens
  source 1..499: mol_type = other DNA
gtaaggctcttctcaaggacaaaaaatatgatatcgtaagctgcatcatgttgactgtgcatttgttgcaatcctctgccaaatttaaataatggggaattatttagagacttgaaaatgacctggatccccattaaataagtttctgattggctggttttgtgattgtaagaaactttacaaagtgaagatgagaaatttagtgcttgtagggtttgagtaatattgtgtatgtattgagcttgagttatgtttgtgctagaagtactatgtgtttactgtgattaaaacttacccttttttggtgaatctgctatttaatggaagtgtcaattaaaaaagaaatagacccgaaagtagttgtttaaattgagcttaatcagaaaatgtataaaatgtgtgttaacatggtaatatgtgttccagtacttgattataataagctgtttttagaactggcatactaagcttccattcacatcacacagccataaccttg

SEQ ID NO: 1212 - DNA, 499 bp, Homo sapiens
  source 1..499: mol_type = other DNA
tgttggctgtctagcacatattacagtcctctgtcggtagactaagctctttgagggagggatgatattttatttttcttagtagaattaaagtcaatctttagcagattgactgacacatggtaggtcaaagtaactacagtatttattgaacttaattgttgactcccctctgtgtatcccatgaacttcttgggtctcttgttcttcagaaagaaaggtagaatacctcactgataaatgtttcttttcttttctttttgaatgtagggcatcacgagaaaatccagccatgcaggaaaaaaaaaggtcaagcatttggcagttgtaagtattgaaaaacaaagatgttagacagcacatgagacaagaaaattacagtcaaaatttatttccaagaatgattttatgtccattttctttccttcattttttttttttaaactaggggtaatggttaagtagctaaactgaactttttttttttttttaatatata

SEQ ID NO: 1213 - DNA, 499 bp, Homo sapiens
  source 1..499: mol_type = other DNA
gtattgggggctgggcacctggacagcaggctggggcgggctgtgcggcaagggctcttgtgaactgggccgggggcgggggggggggggtgcggcgagggtggtctccagggtactgacctgctccgtgtcttgcagagagcgcctgctcgctgtgcccccgggttatgacgacccccaataaaggaaacaaggccttgaaggtgagtgggcagggacaggagcctgtgggctggggtcggggggcacagtgggcgtgcccgcttggcctgtgaccacctgcactgtgccccaggtgaagcgggagccgggtgagaatggcaccagcctgacggatgaggagctggtgaccatgtcggtgcgggagctgaaccagcacctgcggggcctgtccaaggaggagatcgtccagctgaagcagcgccggcgcacgctcaagaaccgcggctacgctgccagctgccgcgtgaagcgggtgacgcagaaggaggagctggag

SEQ ID NO: 1214 - DNA, 499 bp, Homo sapiens
  source 1..499: mol_type = other DNA
aagccacaggatggttactccatcagtggaggaggccgactgggaggtctagaggggcctcgggccaggctcctcccagctgatggcctgccacctggaaggtgggggaactccctggtcagtcctgccaacagaccagagctagatggacggcccacccccagcttttcaaagttaggaggctgggagactcggggttccctgtagcctcctctctggccaggtcccccgtggggcccctgtgcacccagggagcagggggctttgtccgaggccggctcaggggaggtggctgtagaaggtaggaccctggaagatgcacacacagggtcactggctggccctcacctgctattggccaggctgggggctgcggctctcgtggggcgctgttggctggcgggccagggagtgcgggcgcggcggggaggcagaggcaatgtgctgagtcagcgtgactcgccaggaacagccgcgctctgggcagtgccggggttat

SEQ ID NO: 1215 - DNA, 499 bp, Homo sapiens
  source 1..499: mol_type = other DNA
gtctgtgaagcagaggtcagaggtgtttgaaggaaaaggcaggagcgaggactgtgtgatggtggaggcaggaggtggggcttcctttggggttggagggatgtggggtcatctgcagaggaggacacagaacaggagattcctgtccttggagcagggtcagtgtgtctcaggggagaggcatgggggtgaggcttcctatgagattaggtggaacacgggttagtggggagggttagggttagggaagtttctatggagtctgggtgggtctgaggtgtttgagggaggaggcacagaagaggtgttttcgtgatgttggtctagattcagtgtgtctgagggggatggcagagggcagggccttcctgtggggtgggggtggggtctggcgtctcaagagtgtgggcatccagactaggggagggagtgtggcagggaatgttgctggggtgggggggtcttctgacccctcacttacatccccctcccaccccag

SEQ ID NO: 1216 - DNA, 499 bp, Homo sapiens
  source 1..499: mol_type = other DNA
tgaggaccccacctgggggtgggcggggtggcagagatgggcgagaggacccaggggtcgtttagggcacggtggcaaggatgggtgagaggacccgggggtcgcttaccatctgctcttcttcctctctctgccctgccccccacaggccctcaatttggataagtgggtaggtccggccttggatgtcacctgtccttccacccctcctgaccccaggcaggcccgtctctcaggcccacgccctgcacacaggggctggagggtcctcccccaccccagttgtcaggggctgtggagcccagaacaggccaggcaggaaggaaggaaggggatgggggcttctgagcccctgtccccgacgcctgctcctttctcctctttccagtcctttcccccaaccctgatcccagctcctctccgcatgggacctctcccacctcccccatcccaagcgtgagtccctctggtccaggagtgggtccaccatgtgatcacc

SEQ ID NO: 1217 - DNA, 499 bp, Homo sapiens
  source 1..499: mol_type = other DNA
tgaatatcccctcctgggagtggggaggggtcctgtggttctgtccctaggggtcctgcttaattcccttgtcttaggcatggttatcatcacattcagtgctggggagtgtagttctgacattcagtttcctctgtcctgtgaattgcctctaccgccttgtcccctgcagaaaccagaaccctgccacaattcatacaagactggagtaagagagaccctcaaagactgcctaggttgaacatatcttctctaggcttctggggtccgaagttccccttactccatgggcttgggtctagccaagggcagggttgagatggcaggcagaaaggctaaaggtgtcaggcaaaaggctgtgtatttcctaggacatccagtattttcctgttcttcttaatataattattggtaagatatgaaaagatgactaataaccagattggaggatcattgataatattttcataaccataatatagcacatgtgtgatgccat

SEQ ID NO: 1218 - DNA, 499 bp, Homo sapiens
  source 1..499: mol_type = other DNA
caacaggtgccaagctggggcaggagatggagggaggagcttgggaaggggggttttgaatccaggactgggcaggttcctcagtgggagttctgtgccccagccttgtttgcatggtgcacgggggacccagaaatcagaggaatctctggctagggttgggctgggtccagggcctgtatgaagcccttcctggagagaccaggaaaatgtgaagccaccagggatggctgctggggatgcacctaaacagtcagggcaaggatgatgggggccaccaaggcccacccaaagggctggaagcctcccacagaggccctccaaggtcgtggcagctcatctctaggggccatcaagtggccccagagactcagtgggacaagcatttgcaagttgttgcctgggtgggaacctgggcccagagctggtctctgcccagcctgggtgagagggaaggaaaggagggtggatcctgatgggtgtctcacctcctctgcag

SEQ ID NO: 1219 - DNA, 499 bp, Homo sapiens
  source 1..499: mol_type = other DNA
gtaaacccgatgggattgttagaaaggaatcttacctcattttaactgctttgttaccttaaatattgaacaagtgtcactaagctcatggcgaagtgctcctcaatagtattccacttaattccaaaagttttagcaaaagttatgtttagtgtgccctagtaagaggcccctgagcaccagagcttcttggtaacatcacccacagcgccagacacaccgagaggaagaaaatgcccaggcctttgtcttcatgcgactaggaacgcacaacagcactgtgcatgtttcccaggaaggctgtgtggcccccttgcctgagggcctgctgcagtggtgcttccggtcatccgacgacacaggctcgggggttttcctcctgtgaaacacatcaatgatagaggagctgataattaatagaattttacttccttgaaatcagggagtcttgggtgcttaaagccttctagttatcttgaaaaatatagaatcttcttat

SEQ ID NO: 1220 - DNA, 499 bp, Homo sapiens
  source 1..499: mol_type = other DNA
ttgatgatatctagggaaatgtttaagcaaaaacttttggccagttcttttttcttgccttttggagaaatcaggttttgtgtttcctccctttttcccttccacttccctcgccttcacctctccaagacctccttcctcccaaagctctcctcggtggtgggcttatctgtgacaccttatctgatggtgttctttgggagttcacccccaactcatctcctcctgtctgtatcacttgtggcgtccttgacactgcctagtgtcatcctgcacatgtcttatctccactgtgggctggtaatctctcaaggagagttgattcacaggcttgggtggatctattacaggcgtagaaaagcaagctaatgtttccttcaagtgtttacctaatgttaacttttttctaaattttatttaacttctcctcttttgcctttggctacagtcagtccatttcagaggaaaaaaatttaatcaaatgctttttttctgttta

1.-31. (canceled)

32. A trans-splicing nucleic acid, comprising: (a) one or more replacement domains that encode a therapeutic sequence; (b) one or more intronic domains, wherein the one or more intronic domains promote ribonucleic acid (RNA) splicing of the replacement domain primarily in a specific tissue or cell type, and wherein the one or more intronic domains comprise one or more RNA-binding protein sites configured to promote tissue-specific splicing patterns; and (c) one or more antisense domains that promote binding to a target RNA molecule.

33. The trans-splicing nucleic acid of claim 32, wherein the intronic domains comprise one or more sequences that are preferentially targeted by RNA-binding proteins carrying disease-associated mutations.

34. The trans-splicing nucleic acid of claim 32, further comprising a 3′ untranslated region that improves a trans-splicing efficiency of the trans-splicing nucleic acid to the target RNA.

35. The trans-splicing nucleic acid of claim 32, further comprising a 5′ untranslated region that improves the trans-splicing efficiency of the trans-splicing nucleic acid to the target RNA.

36. The trans-splicing nucleic acid of claim 32, further comprising an RNA-binding protein that strengthens the interaction among the trans-splicing nucleic acid molecule and the target RNA molecule, thereby increasing a trans-splicing efficiency of the trans-splicing nucleic acid to the target RNA.

37. The trans-splicing nucleic acid of claim 32, wherein the trans-splicing nucleic acid comprises RNA, DNA, a DNA/RNA hybrid, a nucleic acid analog, a chemically-modified nucleic acid, or a chimera composed of two or more nucleic acids or nucleic acid analogs.

38. A method for modifying a target RNA molecule in a cell, the method comprising administering a trans-splicing nucleic acid to the cell, wherein the trans-splicing nucleic acid comprises (a) one or more replacement domains that encode a therapeutic sequence; (b) one or more intronic domains, wherein the one or more intronic domains promote ribonucleic acid (RNA) splicing of the replacement domain primarily in a specific tissue or cell type, and wherein the one or more intronic domains comprise one or more RNA-binding protein sites configured to promote tissue-specific splicing patterns; and (c) one or more antisense domains that promote binding to the target RNA molecule.

39. The method of claim 38, wherein the one or more intronic domains comprise one or more sequences that are preferentially targeted by RNA-binding proteins carrying disease-associated mutations.

40. The method of claim 38, wherein the trans-splicing nucleic acid further comprises a 3′ untranslated region that improves the trans-splicing efficiency of the trans-splicing nucleic acid to the target RNA.

41. The method of claim 38, wherein the trans-splicing nucleic acid further comprises a 5′ untranslated region that improves the trans-splicing efficiency of the trans-splicing nucleic acid to the target RNA.

42. The method of claim 38, further comprising providing an RNA-binding protein that strengthens the interaction among the trans-splicing nucleic acid and the target RNA molecule, and wherein a strengthening of the interaction among the trans-splicing nucleic acid molecule and the target RNA molecule increases a trans-splicing efficiency of the trans-splicing nucleic acid to the target RNA.

43. The method of claim 38, wherein the trans-splicing nucleic acid comprises RNA, DNA, a DNA/RNA hybrid, a nucleic acid analog, a chemically-modified nucleic acid, or a chimera composed of two or more nucleic acids or nucleic acid analogs.

44. The method of claim 38, further comprising inserting the therapeutic sequence into the target RNA.

45. The method of claim 44, wherein the therapeutic sequence is not inserted into a target RNA in a second tissue or a second cell type.

46. A trans-splicing nucleic acid, comprising: (a) one or more replacement domains that encode a therapeutic sequence; (b) one or more intronic domains configured to promote ribonucleic acid (RNA) splicing of the one or more replacement domains primarily to a target RNA in a specific tissue or a specific cell type, and wherein the one or more intronic domains comprise a sequence configured to be bound by an RNA-binding protein that increases a trans-splicing efficiency of the therapeutic sequence to the target RNA; and (c) one or more antisense domains that promote binding to a target RNA molecule.

47. The trans-splicing nucleic acid of claim 46, wherein the one or more intronic domains comprise a sequence preferentially targeted by an RNA-binding protein carrying one or more disease-associated mutations.

48. The trans-splicing nucleic acid of claim 46, further comprising a 3′ untranslated region that improves the trans-splicing efficiency of the therapeutic sequence to the target RNA.

49. The trans-splicing nucleic acid of claim 46, further comprising a 5′ untranslated region that improves the trans-splicing efficiency of the therapeutic sequence to the target RNA.

50. The trans-splicing nucleic acid of claim 46, further comprising the RNA-binding protein that increases the trans-splicing efficiency of the therapeutic sequence to the target RNA.

51. The trans-splicing nucleic acid of claim 46, wherein the trans-splicing nucleic acid comprises RNA, DNA, a DNA/RNA hybrid, a nucleic acid analog, a chemically-modified nucleic acid, or a chimera composed of two or more nucleic acids or nucleic acid analogs.
